(19) United States
(12) Patent Application Publication
(10) Pub. No.: US 2006/0257852 A1
(43) Pub. Date: Nov. 16, 2006

(54) Severe acute respiratory syndrome coronavirus

(75) Inventors: Rino Rappuoli, Castelnuovo Berardenga (IT); Vega Masignani, Siena (IT); Konrad Stadler, Scharnstein (AU); Jens Peter Gregersen, Wetter (DE); David Chien, Alamo, CA (US); Jang Han, Lafayette, CA (US); John M. Polo, Danville, CA (US); Amy Weiner, Fairfield, CA (US); Michael Houghton, Danville, CA (US); Hyun Chul Song, Berkeley, CA (US); Mi-Young Seo, Yongin-si (KR); John Donnelly, Moraga, CA (US); Hans Dieter Klenk, Marburg (DE); Nicholas Valiante, Fremont, CA (US)

Correspondence Address: Chiron Corporation;Intellectual Property - R440, P.O. Box 8097, Emeryville, CA, 94662-8097, US

(73) Assignee: Chiron Corporation, Emeryville, CA (US)

(21) Appl. No.: 10/822,303

(22) Filed: Apr. 9, 2004

Related U.S. Application Data
(60) Provisional application No. 60/462,218, filed on Apr. 10, 2003.
(60) Provisional application No. 60/462,465, filed on Apr. 11, 2003.
(60) Provisional application No. 60/462,418, filed on Apr. 12, 2003.
(60) Provisional application No. 60/462,748, filed on Apr. 13, 2003.
(60) Provisional application No. 60/463,109, filed on Apr. 14, 2003.
(60) Provisional application No. 60/463,460, filed on Apr. 15, 2003.
(60) Provisional application No. 60/463,668, filed on Apr. 16, 2003.
(60) Provisional application No. 60/463,983, filed on Apr. 17, 2003.
(60) Provisional application No. 60/463,971, filed on Apr. 18, 2003.
(60) Provisional application No. 60/464,899, filed on Apr. 22, 2003.
(60) Provisional application No. 60/464,838, filed on Apr. 22, 2003.
(60) Provisional application No. 60/465,273, filed on Apr. 23, 2003.
(60) Provisional application No. 60/465,535, filed on Apr. 24, 2003.
(60) Provisional application No. 60/468,312, filed on May 5, 2003.
(60) Provisional application No. 60/473,144, filed on May 22, 2003.
(60) Provisional application No. 60/495,024, filed on Aug. 14, 2003.
(60) Provisional application No. 60/505,652, filed on Sep. 23, 2003.
(60) Provisional application No. 60/510,781, filed on Oct. 11, 2003.
(60) Provisional application No. 60/529,464, filed on Dec. 11, 2003.
(60) Provisional application No. 60/536,177, filed on Jan. 12, 2004.
(60) Provisional application No. 60/560,757, filed on Apr. 7, 2004.

(51) Int. Cl. C12Q 1/70; C07H 21/04; C12N 15/86; C07K 14/165

(52) U.S. Cl. 435/5; 435/69.3; 435/456; 435/325; 530/350; 536/23.72

(57) ABSTRACT

An outbreak of a virulent respiratory virus, now known as Severe Acute Respiratory Syndrome (SARS), was identified in Hong Kong, China and a growing number of countries around the world in 2003. The invention relates to nucleic acids and proteins from the SARS coronavirus. These nucleic acids and proteins can be used in the preparation and manufacture of vaccine formulations, diagnostic reagents, kits, etc. The invention also provides methods for treating SARS by administering small molecule antiviral compounds, as well as methods of identifying potent small molecules for the treatment of SARS.

[0001] All documents cited herein are incorporated by reference in their entirety.

### RELATED APPLICATIONS, FROM WHICH PRIORITY IS CLAIMED

[0002] This application incorporates by reference in its entirety U.S. provisional patent application 60/462,218, Attorney Reference No. PP20474.001, filed on Apr. 10, 2003 via Express Mail with the US post office, U.S. provisional patent application 60/462,465, Attorney Reference No. PP20480.001, filed on Apr. 11, 2003 via Express Mail with the US post office, U.S. provisional patent application 60/462,418, Attorney Reference No. PP20480.002, filed on Apr. 12, 2003 via Express Mail with the US post office, U.S. provisional patent application 60/462,748, Attorney Reference No. PP20480.003, filed on Apr. 13, 2003 via Express Mail with the US post office, U.S. provisional patent application 60/463,109, Attorney Reference No. PP20480.004, filed on Apr. 14, 2003 via Express Mail with the US post office, U.S. provisional patent application 60/463,460, Attorney Reference No. PP20480.005, filed on Apr. 15, 2003 via Express Mail with the US post office, U.S. provisional patent application 60/463,668, Attorney Reference No. PP20480.006, filed on Apr. 16, 2003 via Express Mail with the US post office, U.S. provisional patent application 60/463,983, Attorney Reference No. PP20480.007, filed on Apr. 17, 2003 via Express Mail with the US post office, U.S. provisional patent application 60/463,971, Attorney Reference No. PP20480.008, filed on Apr. 18, 2003 via Express Mail with the US post office, U.S. provisional patent application 60/464,899, Attorney Reference No. PP20480.009, filed on Apr. 22, 2003 via Express Mail with the US post office, U.S. provisional patent application 60/464,838, Attorney Reference No. PP20507.001, filed on Apr. 22, 2003 via Express Mail with the US post office, U.S. provisional patent application 60/465,273, Attorney Reference No. PP20518.001, filed on Apr. 23, 2003 via Express Mail with the US post office, U.S. provisional patent application 60/465,535, Attorney Reference No. PP20518.002, filed on Apr. 24, 2003 via Express Mail with the US post office, U.S. provisional patent application 60/468,312, Attorney Reference No. PP20480.010, filed on May 5, 2003 via Express Mail with the US post office, and U.S. provisional patent application 60/473,144, Attorney Reference No. PP20480.011, filed on May 22, 2003, U.S. provisional patent application 60/495,024, Attorney Reference No. PP20480.012, filed on Aug. 14, 2003 via Express Mail with the US post office, U.S. provisional patent application 60/505,652, Attorney Reference No. PP20480.013, filed on Sep. 23, 2003 via Express Mail with the US post office, U.S. provisional patent application 60/510,781, Attorney Reference No. PP20480.014, filed on Oct. 11, 2003 via Express Mail with the US post office, U.S. provisional patent application 60/529,464, Attorney Reference No. PP20480.015, filed on Dec. 11, 2003 via Express Mail with the US post office, U.S. provisional patent application 60/536,177, Attorney Reference No. PP20480.016, filed on Jan. 12, 2004 via Express Mail with the US post office, and U.S. provisional patent application 60/______, Attorney Reference No. PP20480.017, filed on Apr. 7, 2004 via Express Mail with the US post office.

### FIELD OF THE INVENTION

[0003] The invention relates to nucleic acids and proteins from Severe Acute Respiratory Syndrome (SARS) Virus. These nucleic acids and proteins can be used in the preparation and manufacture of vaccine formulations for the treatment or prevention of SARS. The invention also relates to diagnostic reagents, kits (comprising such reagents) and methods which can be used to diagnose or identify the presence or absence of a SARS virus in a biological sample. The invention also relates to methods for the treatment or prevention of SARS utilizing small molecule viral inhibitors and combinations of small molecule viral inhibitors and kits for the treament of SARS.

### BACKGROUND OF THE INVENTION

[0004] An outbreak of a virulent respiratory virus, now known as Severe Acute Respiratory Syndrome (SARS), was identified in Hong Kong, China and a number of other countries around the world in 2003. Patients typically had symptoms including fever, dry cough, dyspnea, headache, and hypoxemia. Isolates of the SARS virus appear to have homology with at least the RNA polymerase gene of several known coronaviruses. A phylogenetic analysis of this homology is presented in Peiris et al., “Coronavirus as a possible cause of severe acute respiratory syndrome”, Lancet, published online Apr. 8, 2003 at http://image.thelancet.com/extras/03art3477web.pdf, incorporated herein by reference in its entirety. Other sequenced fragments of the SARS virus genome appear to overlap with the open reading frame 1b of coronaviruses. See, Drosten et al., “Identification of a Novel Coronavirus in Patients with Severe Acute Respiratory Syndrome”, New England Journal of Medicine, published online at http://www.nejm.org on Apr. 10, 2003, incorporated herein by reference in its entirety.

[0005] The Genome Science Center in British Colombia, Canada published on its website (http://www.bcgsc.ca/bioinfo/SARS/) a draft genome assembly of 29,736 base pairs of a virus believed to be a SARS virus, referred to as the TOR2 isolate. This draft genome assembly is given herein as SEQ ID NO: 1.

[0006] The Centers for Disease Control (CDC) published a nucleotide sequence of a SARS-CoV strain (SEQ ID NO: 2) on its website (http://www.cdc.gov/ncidod/sars/pdf/nucleoseq.pdj). The CDC has also published a phylogenetic tree of the predicted N, S and M proteins (attached as FIG. 6). This tree places the SARS virus outside any of the previously known coronavirus groups.

[0007] There is a growing need for prophylactic or therapeutic vaccines against the SARS virus as well as diagnostic and screening methods and compositions to identify the presence of the virus in, e.g., mammalian tissue or serum.

### SUMMARY OF THE INVENTION

[0008] The invention relates to nucleic acids and proteins from Severe Acute Respiratory Syndrome (SARS) virus. These nucleic acids and proteins can be used in the preparation and manufacture of vaccine formulations for the treatment or prevention of SARS. Such vaccine formulations may include an inactivated (or killed) SARS virus, an attenuated SARS virus, a split SARS virus preparation and a recombinant or purified subunit formulation of one or more SARS viral antigens. Expression and delivery of the polynucleotides of the invention may be facilitated via viral vectors and/or viral particles.

[0009] The invention also relates to diagnostic reagents, kits (comprising such reagents) and methods which can be used to diagnose or identify the presence or absence of a SARS virus in a biological sample. The invention further includes non-coding SARS viral polynucleotide sequences, SARS viral sequences encoding for non-immunogenic proteins, conserved and variant SARS viral polynucleotide sequences for use in such diagnostic compositions and methods.

[0010] The invention further relates to vaccine formulations comprising one or more SARS virus antigens and one or more other respiratory virus antigens. Additional respiratory virus antigens suitable for use in the invention include antigens from influenza virus, human rhinovirus (HRV), parainfluenza virus (PIV), respiratory syncytial virus (RSV), adenovirus, metapneumovirus, and rhinovirus. The additional respiratory virus antigen could also be from a coronavirus other than the SARS coronavirus. Preferably, the additional respiratory virus antigen is an influenza viral antigen.

[0011] The compositions of the invention may further comprise one or more adjuvants. Adjuvants suitable for use in the invention include mucosal, transdermal or parenteral adjuvants. Mucosal adjuvants suitable for use in the invention include detoxified bacterial ADP-ribosylating toxins, such as E. coli heat labile toxoids (e.g., LTK63), chitosan and derivatives thereof, and non-toxic double mutant forms of Bordetella pertussis toxoids. Parenteral adjuvants suitable for use in the invention include MF59 and aluminum or aluminum salts.

[0012] The invention also provides methods for treating SARS by administering small molecule compounds, as well as methods of identifying potent small molecules for the treatment of SARS.

[0013] In one aspect of the invention a method of identifying a therapeutically active agent is provided comprising: (a) contacting the therapeutically active agent with a cell infected with the SARS virus; (b) measuring attenuation of a SARS related enzyme.

[0014] In a more particular embodiment, the therapeutically active agent is a small molecule. In another more particular embodiment, the therapeutically active agent is a nucleoside analog. In another more particular embodiment the therapeutically active agent is a peptoid, oligopeptide, or polypeptide. In another embodiment the SARS related enzyme is SARS protease. In another embodiment the SARS related enzyme is SARS polymerase. In still another embodiment the SARS related enzyme is a kinase. Methods of identifying therapeutically active agents for treatment of SARS virus infection are further discussed in Section V below.

[0015] In another aspect of the invention a method of treating a human infected with SARS is provided comprising administering a small molecule to a patient in need thereof. In one embodiment the small molecule is an inhibitor of SARS protease. In another embodiment the small molecule is an inhibitor of SARS polymerase. In another embodiment the SARS related enzyme is a kinase. In still another embodiment the small molecule is administered orally or parenterally.

[0016] The invention also provides the use of such small molecules in the manufacture of a medicament for the treatment of severe acute respiratory syndrome.

[0017] Small molecule compounds of the present invention include those of less than 1000 g/mol, preferably with an aromatic region and greater than one heteroatom selected from O, S, or N. Preferred small molecules include, but are not limited to acyclovir, gancyclovir, vidarabidine, foscamet, cidofovir, amantidine, ribavirin, trifluorothymidine, zidovudine, didanosine, zalcitabine, and combinations thereof. Interferons may also be used for treating patients, including interferon-α and interferon-β. Interferon treatment has shown promise in treating SARS in monkeys (Enserink (2004) Science 303:1273-1275), particularly when pegylated (Haagmans et al. (2004) Nature Medicine 10:290-293).

[0018] One aspect of the present invention relates to methods for identifying individuals exposed to, and biological samples containing SARS virus (SARSV), and to kits for carrying out the methods. Such methods can utilize nucleic acid detection techniques such as PCR, RT-PCR (the Coronaviridae are RNA viruses), transcription-mediated amplification (TMA), ligase chain reaction (LCR), branched DNA signal amplification assays, isothermal nucleic acid sequence based amplification (NASBA), other self-sustained sequence replication assays, boomerang DNA amplification, strand-displacement activation, cycling probe technology, or combinations of such amplification methods. Such nucleic acid detection techniques utilize oligonucleotides having nucleotide sequence similar to, or complementary to, the SARS viral genome, as primers (e.g., for amplification) and as probes (e.g., for capture or detection), as is well known in the art.

[0019] Alternatively, or in addition to the nucleic acid detection methods described supra, the methods of the present invention can utilize various immunoassay techniques for detection of SARSV antigens and/or antibodies.

[0020] Accordingly, the present invention relates to methods of identifying individuals exposed to SARSV, or biological samples containing SARSV, by detecting the presence of SARSV antigens using antibodies which specifically bind to the same. The antibodies are preferably monoclonal antibodies. Quantification of the amount of viral antigens present in a sample of an individual may be used in determining the prognosis of an infected individual. Preferably, the SARSV antigens to be detected are generally one of the structural proteins, particularly those present on the surface of the viral particles and include, for example, the spike glycoprotein (S), also called E2; the envelope (small membrane) protein (E), also called sM; the membrane glycoprotein (M), also called E1 ; the hemagglutinin-esterase glycoprotein (HE); also called E3; and the nucleocapsid phosphoprotein (N). In preferred embodiments, the antigens to be detected are the S, E and M proteins using antibodies to the same.

[0021] The present invention relates to kits for identifying individual SARSV and reagents used in such kits. The kits comprise a first container which contains antibodies which specifically bind to a SARSV antigen and a second container which contains the SARSV antigen. The antibodies are preferably monoclonal antibodies. The kits may be adapted for quantifying the amount of antigen in a sample of an individual. Such information may be used in determining the prognosis of an infected individual.

[0022] The present invention relates to methods of identifying individuals exposed to SARS virus, or biological samples containing SARSV, by detecting the presence of antibodies against SARS virus antigen in a sample using SARS antigen. Quantification of the amount of anti-SARS protein from SARS antibodies present in a sample of an individual may be used in determining the prognosis of an infected individual. Any one or more of the viral proteins (structural proteins or nonstructural proteins) may be used as antigen to detect the SARSV antibodies; preferably a SARSV antigen that is conserved amoung SARSV isolates is preferred. In this regard, nonstructural protein (e.g., Pol, Hel, 3CLp, MP, PLP1, PLP2) may be particularly useful.

[0023] The present invention relates to kits for identifying individuals exposed to SARS and reagents used therein. The kits comprise a first container which contains antibodies which were produced in response to exposure to an antigen from SARS virus and a second container which contains the SARS antigen(s). The kits may be adapted for quantifying the amount of anti-SARS antibodies present in a sample of an individual. Such information may be used in determining the prognosis of an infected individual.

[0024] The present invention relates to methods of identifying individuals exposed to SARS virus, or biological samples containing SARSV, by detecting the presence of nucleic acid from SARS virus. Quantification of the amount of SARS nucleic acid present in a sample of an individual may be used in determining the prognosis of an infected individual. The methods utilize oligonucleotide probes and/or primers that are similar or complementary in sequence to the SARSV genome or transcription or replication products. Preferred probes and primers are described herein. Also included in the present invention are kits for carrying out the methods of detecting the SARSV nucleic acid.

[0025] The invention further includes a method for the treatment and/or prevention of SARS through the administration of a therapeutically effective amount of at least one antiviral compound from among those described in the US patents and published international patent applications listed in Table 1 and Table 2. In one embodiment of the method, the antiviral compound is a small molecule. In another embodiment, the antiviral compound is a protease inhibitor. In a further embodiment, the antiviral protease inhibitor is a 3C-like protease inhibitor and/or a papain-like protease inhibitor. In another embodiment, the antiviral compound is an inhibitor of an RNA-dependent RNA polymerase. In another embodiment, a first antiviral compound which is a protease inhibitor is administered with a second antiviral compound which is an RNA-dependent RNA polymerase inhibitor. The invention further provides for the administration of a steroidal anti-inflammatory drug in combination with at least one antiviral compound, for example, from the antiviral compounds described in the documents listed in Table 1 and Table 2.

[0026] The invention further provides for a method for the treatment and/or prevention of SARS through the administration of a therapeutically effective amount of at least one antiviral compound from among those described in the US patents and published international patent applications listed in Table 1 and Table 2 by inhalation. In one embodiment of the method, the antiviral compound is a small molecule. In another embodiment, the antiviral compound is a protease inhibitor. In a further embodiment, the antiviral protease inhibitor is a 3C-like protease inhibitor and/or a papain-like protease inhibitor. In another embodiment, the antiviral compound is an inhibitor of an RNA dependent RNA polymerase. In another embodiment, a first antiviral compound which is a protease inhibitor is administered with a second antiviral compound which is an RNA-dependent RNA polymerase inhibitor. The invention further provides for the administration of a steroidal anti-inflammatory drug in combination with at least one antiviral compound, for example, from the antiviral compounds described in the documents listed in Table 1 and Table 2 by inhalation. The steroidal anti-inflammatory drug may be administered by inhalation for a local effect or administered for systemic absorption such as via an oral or intravenous route.

[0027] The invention further provides the use of an antiviral compound, as defined above, in the manufacture of a medicament for the treatment of severe acute respiratory syndrome.

[0028] The invention further provides for a kit for use by a consumer for the treatment and/or prevention of SARS. Such a kit comprises: (a) a pharmaceutical composition comprising a therapeutically effective amount of at least one antiviral compound from among those described in the US patents and published international patent applications listed in Table 1 and Table 2 and a pharmaceutically acceptable carrier, vehicle or diluent; (b) a container for holding the pharmaceutical composition; and, optionally; (c) instructions describing a method of using the pharmaceutical compositions for the treatment and or the prevention of SARS. The kit may optionally contain a plurality of antiviral compounds for the treatment of SARS wherein the anti viral compounds are selected from 3C-like protease inhibitors and papain-like protease inhibitors. In a further embodiment, the kit contains an antiviral compound which is an RNA-dependent RNA polymerase inhibitor. When the kit comprises more than one antiviral compound, the antiviral compounds contained in the kit may be optionally combined in the same pharmaceutical composition.

[0029] An additional aspect of the invention provides for the use of at least one of the antiviral compounds described in the US patents and published international patent applications listed in Table 1 and Table 2 for the manufacture of a medicament for the treatment or prevention of SARS.

### BRIEF DESCRIPTION OF THE DRAWINGS

[0030] FIG. 1: Schematic of coronavirus genome organization.

[0031] FIG. 2: Schematic of coronavirus ORF1a/ORF1b gene products.

[0032] FIG. 3(A-C): Alignment of coronavirus polynucleotide sequences for selected genes (including nucleocapsid (N), matrix (M), and hemagluttinin-esterase (HE)).

[0033] FIG. 4(A-F): Alignment of coronavirus polypeptide sequences (including ORF1a/ORF1b, nucleocapsid (NP), hemagluttinin-esterase (HE), envelope (Sm or E), matrix (M), and spike (S).

[0034] FIG. 5: Alignment of spike (S) polypeptide sequences, taken from FIG. 4, in the region of the junction of the S1 and the S2 domains, and protease cleavage site for selected coronaviruses.

[0035] FIG. 6: CDC phylogenetic tree of SARS-CoV strain (Clustalx 1.82, neighbor-joining tree).

[0036] FIG. 6A shows coronavirus N protein analysis,

[0037] FIG. 6B shows coronavirus S protein analysis, and

[0038] FIG. 6C shows coronavirus M protein analysis.

[0039] FIG. 7: Conserved and specific sequence of the SARS virus.

[0040] FIGS. 7A-7D show multiple sequence alignments (CLUSTAL W 1.82) of the structural proteins of the SARS virus genome (7A: PEP4 Spike protein; 7B: PEP7 small membrane protein; 7C: PEP8 matrix glycoprotein; 7D: PEP13 nucleocapsid protein), which have counterparts in all or some of the other known coronaviruses.

[0041] FIGS. 7E-7H show dendrograms reporting the protein distances among the sequences in alignments 7A-7D. Labels 229E: human coronavirus; MEV: murine hepatitis virus; TGV: transmissible gastroenteritis virus; AIBV: avian infectious bronchitis virus; BOVINE: Bovine coronavirus; PEDV: porcine epidemic diarrhea virus.

[0042] FIG. 8: Alignment of the 5′UTR of several coronaviruses, to show consensus nucleotide sequence at the 5′UTR.

[0043] FIG. 9: Sequences of preferred primers for amplification of the 5′UTR. F and R denote forward and reverse PCR primers, and the numbers indicate nucleotide positions withing FIG. 8.

[0044] FIG. 10: Alignment of the 3′UTR of several coronaviruses, to show consensus nucleotide sequence at the 3′UTR.

[0045] FIG. 11: Sequences of preferred primers for amplification of the 3′UTR. F and R denote forward and reverse PCR primers, and numbers indicate nucleotide positions within FIG. 10.

[0046] FIG. 12: Coiled-coil prediction for SEQ ID NO: 6042, using Coils program (FIG. 12A) or LearrCoil (FIG. 12B).

[0047] FIG. 13: Example of insertion of a reporter gene-of-interest at a site between exisiting SARS virus genes. Small nonstructural gene products are not depicted schematically.

[0048] FIG. 14: Schematic depicting representative examples of SARS virus replicons. Small nonstructural gene products are not depicted schematically.

[0049] FIG. 15: SARS virus nsp2 proteinase (3CLp) and identification of catalytic and substrate sites.

[0050] FIG. 16: alignment of SARS virus nsp2 proteinase (3CLp) with that of avian IBV, MHV, and BCoV. Residues in dotted boxes are key residues the substrate sites (F, Y & H); residues in solid boxes are catalytic cysteine (C) and histidine (H) residues.

[0051] FIG. 17: Genome organization of SARS coronavirus. Replicase and structural regions are shown, along with the predicted products of cleavage within ORF1a and ORF1b. The position of the 5′ RNA leader sequence (L), the 3′ poly(A) tract and the ribosomal frame-shift consensus between ORF1a and ORF1b are also indicated. Each box represent a protein product. They are shaded according to the level of amino acid identity with corresponding proteins of other coronaviruses (see also Table 2). The SARS-specific genes are white. Positions of the 9 SARS-specific six-base IG sequences (5′-ACGAAC-3′; SEQ ID NO 7293) are indicated by arrows.

[0052] FIG. 18: Genome organization of Coronaviruses representative of group 1 (HCoV-229E, accession number: AF304460), group 2 (mouse hepatitis virus MHV, accession number: NC_{—}001846), group 3 (avian infectious bronchitis virus AIBV, accession number: NC_{—}001451) and SARS coronavirus. Other completely sequenced coronaviruses used in this study are available at the following accession numbers: porcine epidemic diarrhea virus (PEDV), AF353511; transmissible gastroenteritis virus (TGV), ND_{—}002306; Bovine coronavirus (BCoV): AF220295. Red boxes represent group-specific genes. The position of the leader RNA sequence and poly(A) tract is also indicated in genomes where they are reported. The position of specific IG sequences is indicated by circles of different shades. In the SARS genome, we also find three IG sequences specific for group 2 coronavirus.

[0053] FIG. 19: Topological model predicted for the spike protein anchored to the viral membrane. Structural and predicted functional domains are indicated. The N-terminal region (S1) is predicted to contain the receptor binding domain. Two coiled coil regions within the S2 domain, partially superimposed to leucine zipper motifs are presumably involved in oligomerization. The hydrophobic domain is responsible for membrane anchoring.

[0054] FIG. 20: Phylogenetic tree obtained from the multiple sequence alignment of a 922 bp internal region of the pol gene from 12 coronaviruses and SARS. Numbers at the nodes represent the result of a bootstrap analysis and strongly support the branches. Sequences not available within the complete coronavirus genomes have been retrieved from GenBank at the following accession numbers: hemagglutinating encephalomyelitis virus of swine (PHEV), AF124988, Human OC43 virus (OC43), AF124989, canine coronavirus (CCV), AF124986, feline infectious peritonitis virus (FIPV), AF124987, turkey coronavirus (TCV), AF124991, syaloacryoadenitis virus of rats (SDAV), AF124990.

[0055] FIG. 21: 21A. Unrooted tree obtained from the alignment of consensus sequences of the group I and group II S1 domain of spike proteins (G1_cons and G2_cons) with those of a group 3 spike (AIBV) and the spike of SARS virus. The number indicates the result of a bootstrap analysis. The sequences used to generate the consensus profile from group 1 are: HcoV-229E, accession number P15423; porcine epidemic diarrhea virus (PEDV), acc no: NP_{—}598310; transmissible gastroenteritis virus (TGV), acc no: NP_{—}058424; Canine coronavirus (CCV), acc no: S41453; porcine respiratory virus (PRV), acc no: S24284; feline infectious peritonitis virus (FIPV), acc no: VGIH79. The sequences used to generate the consensus profile from group 2 are: mouse hepatitis virus (MHV), acc no: NP_{—}045300; Bovine coronavirus (BCoV), acc no: NP_{—}150077; Human coronavirus OC43, acc no: P36334; hemagglutinating encephalomyelitis virus of swine (PHEV), acc no: AAL80031; for group 3, only the sequence of the spike protein of avian infectious bronchitis virus (AIBV), acc no: AAO34396 was used. 21B: Schematic representation of cysteine positions in S1 domains of group 1, 2 and 3, compared to the SARS spike. Horizontal bars represent the S1 amino acid sequences (in the case of SARS and AIBV) or the consensus profiles (generated from group 1, G1 _cons, and from group 2, G2_cons). The length of the bars are not to scale. Relative cysteine positions are indicated by rectangle bars. Only cysteines perfectly conserved within each consensus are reported. Lines connect cysteines conserved between the SARS S1 domain and the consensus sequences as shown.

[0056] FIG. 22: illustration of a Neisseria Adhesin A protein (NadA).

[0057] FIG. 23: Raw translation from SARS coronavirus genome (reading frame +1).

[0058] FIG. 24: Raw translation from SARS coronavirus genome (reading frame +3)

[0059] FIG. 25: 1b and Spike open reading frames, separated by *.

[0060] FIG. 26: SARS growth in vero cells.

[0061] FIG. 27: chromatogram of the capture step of SARS coronavirus on Matrix Cellufine Sulfate Superformance 150/10. Analysis was on 100 ml coronoavirus harvest. The left Y axis shows absorbance at 280 nm. The right Y axis shows the gradient (% B). The X axis shows the volume (ml).

[0062] FIG. 28: Silver-stained MCS chromatography fractions. Lanes are: (1) marker; (2) coronavirus vero cell harvest; (3) coronavirus vero cell harvest, after 0.65 μm filtration; (4) flowthrough; (5) wash; (6) 20% peak (virus peak). Lanes were loaded with 1 μg of test protein.

[0063] FIG. 29: Western Blot of MCS chromatography fractions. Lanes are as described for FIG. 28.

[0064] FIG. 30: Linear density gradient ultracentrifugation, 15-60% sucrose (SW28, 2 hours, 20000 rpm). The graph shows protein concentration (▪) and sucrose concentration (♦).

[0065] FIG. 31: Silver-stained density gradient fractions on NuPage 4-12% Bis-Tris-Ge (Novex), reduced conditions, heated for 10 minutes at 70° C. Lanes are: (1) marker; (2) 20% peak MCS; (3) density gradient fraction 11; (4) density gradient fraction 12; (5) density gradient fraction 13; (6) density gradient fraction 14; (7) density gradient fraction 15; (8) density gradient fraction 16; (9) density gradient fraction 17. The bulk of proteins was in fractions 15 to 17. Lanes 2, 8 and 9 were loaded with 1 μg protein.

[0066] FIG. 32: Chromatogram of the Capture Step of SARS coronavirus on MCS. Details are as for FIG. 27, except that 200 ml harvest was used.

[0067] FIG. 33: Silverstain (left) and Western Blot (right) of chromatographic fractions. Lanes are as described for FIGS. 28 and 29, except that lane (6) is the 5% peak. Treatment before SDS-PAGE was at room temperature for 30 minutes.

[0068] FIG. 34: Density Gradient Ultracentrifugation, 15-40% sucrose (SW28, 2 hours, 20000 rpm). The graph shows protein concentration (▪) and sucrose concentration (♦).

[0069] FIG. 35: Silverstain (left) and Western Blot (right) of Density Gradient Ultracentrifugation fractions on NuPage 4-12% Bis-Tris-Ge (Novex), reduced conditions. Lanes are: (1) marker; (2) density gradient fraction 6; (3) density gradient fraction 7; (4) density gradient fraction 8; (5) density gradient fraction 9; (6) density gradient fraction 10; (7) density gradient fraction 15. Fractions 7-10 (lanes 3-6) contained pure coronavirus proteins. The bulk of impurities was in fraction 15 (lane 7). Lanes 2, 8 and 9 were loaded with ˜1 μg protein. Treatment before SDS-PAGE was at room temperature for 30 minutes.

[0070] FIG. 36: EM pictures of Density Gradient Fractions 8-10. FIG. 36A shows fraction 8; FIG. 36B shows fraction 9; FIG. 36C shows fraction 10.

[0071] FIG. 37: Spike/NadA fusion constructs.

[0072] FIGS. 38 and 39: Results of the expression in E. coli of S1_{L}, S1_{L}-NadA and S1_{L}-NadA_{Δanchor}.

[0073] FIG. 38 shows SDS-PAGE analysis of total lysates from BL21(DE3)/pET, BL21(DE3)/pET-S1_{L} and BL21 (DE3)/pET-S1_{L}-NadA_{Δanchor}. The bands are indicated by an arrow, and the three lanes are, from left to right: BL21(DE3)/pET; BL21(DE3)/pET-S1_{L}; BL21(DE3)/pET-S1_{L}-NadA_{Δanchor}.

[0074] FIG. 39 shows (39A) SDS-PAGE and (39B) western blot analyses of total lysates from BL21(DE3)/pET, BL21(DE3)/pET-S1_{L}-NadA (grown under un-induced condition) and BL21(DE3)/pET-S1_{L}-NadA (grown under induced condition). The bands are indicated by an arrow, and lanes are, from left to right: BL21(DE3)/pET; BL21(DE3)/pET-S1_{L}-NadA; BL21(DE3)/pET-S1_{L}-NadA. The western blot shows the presence of oligomeric forms of the protein.

[0075] FIG. 40: Schematic of SARS Spike clones.

[0076] FIG. 41: Transient Expression of SARS Spike Proteins (western blot of COS7 cell lysate). Each lane of the 4-20% TG SDS gel was loaded with 20 μg cell lysate (total 1.2 mg). The labeling antibodies are shown.

[0077] FIG. 42: Western blot analyses of COS7 cell lysates on 4% TG SDS gel showing oligomerization state of intracellular S molecules.

[0078] FIG. 43: Western blot analyses of COS7 cell lysates on 4-20% TG SDS gel showing Transient Expression of SARS Spike Proteins. Lanes are: (1) mock, AF; (2) mock, DF; (3) nSh, AF; (4) nSh, DF; (5) nShΔTC, AF; (6) nShΔTC, DF. Each lane was loaded with 5 μl of each sample, 400 μl total. The blot was labeled with antibody against the His-tagged protein.

[0079] FIG. 44: Western blot analyses of COS7 cell medium on 4-20% TG SDS gel showing Transient Expression of SARS Spike Proteins. Truncated spike protein is secreted. Spike proteins were purified from the culture medium (from a 10 cm plate), first by a ConA column and then finally by His·tag Magnetic beads. Each lane was loaded with one third of the material.

[0080] FIG. 45: Western blot analyses of COS7 cell lysates on 4-20% TG SDS gel showing glycoslation of SARS spike proteins. In the two left-hand blots (lanes 1-5), samples were boiled in SDS and β-mercaptoethanol; in the two right-hand blots (lanes 6-11), samples were in SDS only, with no boiling. Lanes 1-8 were labeled with a monoclonal raised against the His-tag protein; labes 9-11 were labeled with rabbit anti-SARS antibody.

[0081] FIG. 46: Effect of SARS spike protein expression on cell viability.

[0082] FIG. 47: Western blot analyses of COS7 cell lysates on 4% TG SDS gels showing oligomerization state of intracellular spike molecules. Blots were labeled with anti-His-tag mAb. The membrane fraction of COS7 cell lysate was fractionated by a sizing column before loading the lanes. Fractions 7 to 14 show bands with kDa values of: 71000, 1400, 898, 572, 365, 232, 148 and 99, respectively.

[0083] FIG. 48: Fractionation of cells into aqueous and detergent fractions.

[0084] FIG. 49: Schematic of constructs for use in OMV preparation.

[0085] FIG. 50: SARS HR1 and HR2 constructs.

[0086] FIG. 51: Vaccine protection froms SARS in Balb/c mouse model.

[0087] FIG. 52: Expressed on Spike protein in transfected 293 cell lysates (52A) or COS7 cell culture supernatants (52B). Proteins were separated on 4-20% TG SDS gels. The label was anti-His-tag, except for the right-hand three lanes of 52B, where the label was rabbit anti-SARS serum.

[0088] In FIG. 52A, the left-hand three lanes were treated with DTT and were boiled, but neither treatment was used for the right-hand three lanes. In FIG. 52B, no DTT was used, but all lanes were heated to 80° C. for 5 minutes.

[0089] FIG. 53: Western blot of Spike proteins expressed in COS7 cells. Proteins were incubated at room temperature (RT), 80° C. or 100° C. to check for any effect on molecular weight. FIG. 54 shows similar experiments on SARS virions.

[0090] FIG. 55: Results of a pulse chase experiment, showing expression and processing of SARS spike protein following infection with alphavirus replicon particles. Cells were treated with or without EndoH as shown.

[0091] FIG. 56: Effect of heating on Spike protein trimers.

[0092] FIG. 57: Coomassie blue-stained gel of yeast-expressed proteins. Lanes are: 1-See Blue Standard (10 μl); 2-pAB24 gbl (20 μg); 3-SARS Spike S1 c.1 gbl (20 μg); 4-SARS Spike S1 c.2 gbl (20 μg); 5-See Blue Standard (10 μl ); 6-pAB24 ip (5 μl ); 7-SARS Spike S1 c.1 (5 μl ); 8-SARS Spike S1 c.2 (5 μl).

[0093] FIGS. 58 to 64: Schematics of preparation of yeast expression constructs.

[0094] FIGS. 65 to 66: Yeast-expressed sequences for Spike.

[0095] FIG. 67: Western blots showing expression of SARS spike protein from alphavirus replicon particles and replicon RNA.

[0096] FIG. 67A was run under non-reducing conditions and at room temperature (i.e. no heating), with lanes: (1) VEE/SIN-spike infection; (2) VEE/SIN-GFP infection; (3) Replicon-spike RNA transfection; (4) Replicon-GFP RNA transfection.

[0097] FIG. 67B was run with SARS virions at different temperatures, as shown.

[0098] FIG. 68: induction of antibody responses in mice. Vaccine groups are: (1) Inactivated SARS Virus; (2) Truncated Recombinant Spike Protein; (3) Full length Spike: DNA+DNA.PLG+ Alphavirus; (4) Full length Spike: Alphavirus particles only.

[0099] FIG. 69: Binding of human monoclonal antibody S3.2 to purified truncated Spike protein. The X-axis shows antibody concentration, and the Y-axis shows ELISA absorbance. The interpolation result is 2158.13.

[0100] FIG. 70: Geometric mean ELISA titers of antibodies induced by the SARS-CoV spike protein delivered as different vaccines (left to right: inactivated virus; 3 μg truncated spike protein; 75 μg DNA encoding truncated spike protein.

[0101] FIG. 71: Neutralization titers after immunization with (left) nSdΔTC protein or (right) DNA encoding nSdΔTC, delivered on PLG.

[0102] FIG. 72: Correlation between the spike antigen binding and neutralizing antibodies

[0103] FIG. 73: Western blot of CHO cell lines expressing Spike protein in full-length form (left) or in truncated form (right). Proteins were separated by 4-12% SDS-PAGE, with boiling in DTT and staining by polyclonal serum.

[0104] FIG. 74: Structural components of SARS-CoV spike glycoprotein and expression construct. L denotes leader peptide (residues 1-13), TM the transmembrane, and Cy the cytoplasmic tail segments. The hexa-His tags are not shown.

[0105] FIG. 75: Western blot analysis of SARS spike proteins expressed in COS7 cells.

[0106] In FIG. 75A, COS7 cells were transfected with indicated plasmid constructs and the expressed proteins in cell lysates 48 hr post-transfection were analysed by SDS-PAGE (4-20% polyacrylamide) in reducing and denaturing condtions, with proteins visualized by anti-histidine Mab.

[0107] In FIG. 75B, proteins were collected from cell culture medium 48 hr post-transfection and purified first by a ConA column and then by His-tag magnetic beads. Purifed proteins were analysed by SDS-PAGE (4-20% polyacrylamide) and were visualized by anti-SARS rabbit serum.

[0108] FIG. 76: Endo H sensitivity of C-terminal truncated spike protein (SΔ) found in cell lysate (lanes 1,2) and culture medium (lanes 3,4). Positions of internal SΔ protein and secreted SΔ protein are marked with arrow heads.

[0109] FIG. 77: Oligomeric status of the SARS spike protein. Recombinant S protein oligomer in COS7 cells transfected with the full-length spike construct (nSh). The cell lysates were treated with DTT and/or heat as indicated above each lane. The different forms of S protein in treated and untreated samples were visualized by SDS-PAGE (4% polyacrylamide) and Western blot analysis using anti-histidine MAb.

[0110] FIG. 78: Effect of heat denaturation on the oligomeric status of recombinant S protein in the absence of DTT. The COS7 cell lysates were heated before the electrophoresis as indicated and the S proteins were visualized as described fogi FIG. 77.

[0111] FIG. 79: Effect of heat denaturation on the oligomeric status of spike protein in SARS virion particles. SARS-CoV were grown in Vero cells, purified and solubilized from the virion particles by SDS, heat-denatured as indicated and visualized as described in FIG. 77, except that rabbit antiserum against the purified virus was used as a probe.

[0112] FIG. 80: Analysis of the oligomeric status of SARS virion spike protein by cross-linking experiment. Solubilized SARS virion proteins were treated with DMS. Both untreated (−) and DMS treated (+) virion proteins were heat denatured in the absence of DTT and visualized by 4% PAGE followed by silver staining.

[0113] FIGS. 81 & 82: Analysis of the oligomeric status of truncated spike protein by heat denaturation. Truncated spike protein within COS7 cell lysates (81) or secreted into culture medium (82) were heat denatured as indicated in the absence of DTT and visualized by Western blot analysis.

[0114] FIG. 83: Reactivity of deglycosylated full-length spike oligomer with conformational and non-conformational antibody. The full-length recombinant spike oligomer was partially deglycosylated with PNGase F in non denaturating condition and visualized by Western blot analysis using anti-histidine Mab (lane 1,2,3) or rabbit antiserum against purified SARS CoV (lane 4,5,6).

[0115] FIG. 84: Localization of expressed SARS spike proteins in fractionated COS7 cell lysate visualized by western blot. Cells were transfected with indicated plasmids and lysed with Dounce homogeniser in hypotonic buffer 48 hr post transfection. Cell lysate was centrifuged to obtain soluble cytosol and insoluble membrane fraction that was further solublized by 4% Triton X-100. Proteins were heated with SDS at 80 C and analysed by SDS-PAGE (4-20% polyacrylamide) in reducing condtion. Proteins were visualized by anti-histidine Mab. The cytosol fractions were loaded in lanes 1, 3, and 5 and the membrane fractions were loaded in lanes 2, 4, and 6.

[0116] FIG. 85: Intracellular and surface expression of recombinant full-length (A,D) or truncated (B,E) spike protein in COS7 cells. The cells were fixed at 48 hrs posttransfection and either treated with detergent (Cytofix/perm, BD Biosciences) for intracellular immunofluorescence (A,B,C) or with 2% paraformaldehyde for cell surface immunofluorescence observation (D,E,F) at ×40 magnification. Mock transfected cells (C,F) were included as controls.

[0117] FIGS. 86-105: SDS-PAGE od E. coli expressed proteins. Tot=total protein; Sol=soluble protein fraction. Labels are protein names (Tables 26-30).

[0118] FIG. 106: Immunofluorescence after administration of vector encoding optimsed N antigen.

[0119] FIG. 107: Immunofluorescence of (A) native and (B) codon-optimsed M sequences.

[0120] FIG. 108: Immunofluorescence of (A) native and (B) codon optimsed E sequences.

[0121] FIGS. 109-111: Western blots of Vero cells using rabbit antibodies obtained after immunization with spike proteins expressed in E. coli.

[0122] FIG. 112: Spike protein expression in 293 cells. Lanes: (M) Markers; (1) Mock transfected; (2,6) cells expressing nS protein, lysate; (3,7) cells expressing nSdTC protein, lysate; (4,8) cells expressing nS protein, supernatant; (5,9) (4) cells expressing nSdTC protein, supernatant. Staining antibody: (2 to 5) mouse serum obtained after DNA immunization; (6 to 9) rabbit serum obtained after immunization with whole killed virus.

[0123] FIG. 113: Six reading frames of SEQ ID NO: 9968.

[0124] FIG. 114: Six reading frames of SEQ ID NO: 10033.

[0125] FIG. 115: Alignment of bovine coronavirus pol 1ab (top row; SEQ ID NO: 10068), avian infectious bronchitis pol 1ab (second row; SEQ ID NO: 10069), murine hepatitis virus pol 1ab (third row; SEQ ID NO: 10070), SEQ ID NO^{S}: 9997/9998 (fourth row) and a consensus sequence (bottom row; SEQ ID NO: 10071).

[0126] FIG. 116: Schematic of coronavirus genome organization.

[0127] FIG. 117: Schematic of coronavirus ORF1a/ORF1b gene products, including “*” region.

[0128] FIG. 118: Alignment.

[0129] FIG. 119: Alternative start codons within SEQ ID NO: 10080.

[0130] FIG. 120: Six reading frames of SEQ ID NO: 10084.

[0131] FIG. 121: Alignment of SEQ ID NO: 10033 and SEQ ID NO: 10084.

[0132] FIG. 122: Reading frames in SEQ ID NO: 10084.

[0133] FIG. 123: Start codon analysis for SEQ ID NO: 10084.

[0134] FIG. 124: BLAST analysis of SEQ ID NO: 10210.

[0135] FIG. 125: Epitope analysis of SEQ ID NO: 10210 by either (13A) Hopp & Woods or (13B) Kyte & Doolittle.

[0136] FIG. 126: Reading frames in SEQ ID NO: 10299.

[0137] FIG. 127: Reading frames in SEQ ID NO: 10505.

[0138] FIG. 128: Reading frames in SEQ ID NO: 11563.

[0139] FIG. 129: Reading frames in SEQ ID NO: 10033.

[0140] FIG. 130: Alignment of SEQ ID NO: 9997 and SEQ ID NO: 10033.

[0141] FIG. 131: Reading frames in SEQ ID NO: 10299.

[0142] FIG. 132: Reading frames in SEQ ID NO: 10505.

[0143] FIG. 133: Western Blot of SARS protease purification fractions.

[0144] FIG. 134: Cleavage of DABCYL-EDANS (a fluorescent tagged peptide with a SARS protease cleavage site) by SARS protease at different concentrations. The graph shows activity/concentration correlations with no protease (♦), 0.95 uM protease (▪) and 2.86 uM protease (●).

[0145] In the event of a discrepancy between a sequence in the sequence listing and a sequence in the drawings, the drawings should take precedence.

### DETAILED DESCRIPTION OF THE INVENTION

[0146] The practice of the present invention will employ, unless otherwise indicated, conventional methods of chemistry, biochemistry, molecular biology, immunology and pharmacology, within the skill of the art. Such techniques are explained fully in the literature. See, e.g., Remington's Pharmaceutical Sciences, Mack Publishing Company, Easton, Pa., 19th Edition (1995); Methods In Enzymology (S. Colowick and N. Kaplan, eds., Academic Press, Inc.); and Handbook of Experimental Immunology, Vols. I-IV (D. M. Weir and C. C. Blackwell, eds., 1986, Blackwell Scientific Publications); Sambrook, et al., Molecular Cloning: A Laboratory Manual (2nd Edition, 1989); Handbook of Surface and Colloidal Chemistry (Birdi, K. S. ed., CRC Press, 1997); Short Protocols in Molecular Biology, 4th ed. (Ausubel et al. eds., 1999, John Wiley & Sons); Molecular Biology Techniques: An Intensive Laboratory Course, (Ream et al., eds., 1998, Academic Press); PCR (Introduction to Biotechniques Series), 2nd ed. (Newton & Graham eds., 1997, Springer Verlag); Peters and Dalrymple, Fields Virology (2d ed), Fields et al. (eds.), B.N. Raven Press, New York, N.Y.

[0147] All publications, patents and patent applications cited herein, are hereby incorporated by reference in their entireties.

[0148] Severe Acute Respiratory Syndrome (SARS) virus has recently been identified as a new viral species. The SARS viral species includes the following isolates.
[0149] two virus isolates described in Peiris et al. “Coronavirus as a possible cause of severe acute respiratory syndrome” Lancet published online at http://image.thelancet.com/extras/03art3477web.pdf on Apr. 8 2003, incorporated herein by reference in its entirety and the sequences deposited with GenBank at accession number AY268070.
[0150] the isolates and viral sequences described in Drosten et al., “Identification of a Novel Coronavirus in Patients with Severe Acute Respiratory Syndrome”, New England Journal of Medicine, published online at http://www.nejm.org on Apr. 10, 2003.
[0151] the isolates and viral sequences described on the website of the WHO network on Mar. 25 and 24, 2003.
[0152] the isolates and viral sequences described in Tsang et al., “A Cluster of Cases of Severe Acute Respiratory Syndrome in Hong Kong” New England Journal of Medicine, published online at http://www.nejm.org on Mar. 31, 2003.
[0153] the isolates and viral sequences described in Poutanen et al., “Identification of Severe Acute Respiratory Syndrome in Canada” New England Journal of Medicine, published online at http://www.nejm.org on Mar. 31, 2003.
   As described in the Lancet article, a 646 base pair polynucleotide from the SARS virus has weak homology to viruses of the family Cornoaviridae. The Lancet article further reports that a deduced amino acid sequence (of 215 amino acids) from this sequence has about 57% sequence homology to the RNA polymerase of bovine coronavirus and murine hepatitis virus. Phylogenetic analysis of the protein sequences are also presented in the Lancet article showing that the polymerase sequence is most closely related to the group II coronaviruses.

[0154] Additional SARS viral isolates can be identified, isolated and/or sequenced by virologists skilled in the art. Virologists can readily identify new viral isolates as a SARS virus. Criteria which a virologist may use to identify new SARS isolates include: sequence homology of the new isolate to known SARS viral isolates; similar genomic organization of the new viral isolate to known SARS viral isolates; immunological (serologic) similarity or identity with known SARS viral isolates; pathology; and similarity of virion morphology with known SARS viral isolates; and similarity of infected cell morphology as that caused by known SARS viral isolates (visualized, for instance, by electron microscopy).

[0155] Methods for isolating and sequencing SARS viral isolates include the methods described by Peiris et al. in the Lancet paper. As reported in the Lancet paper, RNA from clinical samples can be reverse transcribed with random hexamers and cDNA can be amplified with primers having sequences of SEQ ID NOS: 6584 & 6585 in the presence of 2.5 mmol/L magnesium chloride (94° C. for 1 min, 50° C. for 1 min, and 72° C. for 1 min).

[0156] Reverse transcription of a viral isolate using random hexamers can be accomplished in an RT-PCR assay as follows. Virus isolates are propagated on mammalian cells, particularly fetal rhesus kidney cells. Total RNA from virus-infected and virus-uninfected fetal rhesus kidney cells is then isolated. RNA samples are reverse transcribed with a primer having SEQ ID NO: 6586. cDNA can be amplified by a primer having SEQ ID NO: 6587. Unique PCR products (in size) in the infected cell preparation are then cloned and sequenced, and genetic homology of the sequence compared with those in GenBank.

[0157] One skilled in the art would be able to identify and clone additional genomic regions using a variety of standard cloning techniques, such as, for example, using random primer RT-PCR and detection of sequences overlapping one or more of the above sequences, and/or using oligonucleotide primers, e.g., degenerate primers, based on the sequences provided herein (see FIGS. 1-5, FIGS. 8-11, SEQ ID NOS: 3-20).

[0158] Cloning, sequencing and identification of SARS virus by one skilled in the art can be further facilitated by the use of polynucleotide sequences, particularly RNA polymerase sequences, from related Coronaviruses.

[0159] Sequence homology of new viral isolates with the known SARS isolates described above can be readily determined by one skilled in the art. New SARS isolates may be identified by a percent homology of viral nucleotide sequences of 99%, 95%, 92%, 90%, 85%, or 80% homology of the new virus to known SARS viral polynucleotide sequences. New SARS isolates may also be identified by percent homology of 99%, 95%, 92%, 90%, 85%, or 80% homology of the polypeptides encoded by the polynucleotides of the new virus and the polypeptides encoded by known SARS virus.

[0160] New SARS isolates may also be identified by a percent homology of 99%, 95%, 92%, 90%, 85%, or 80% homology of the polynucleotide sequence for specific genomic regions for the new virus with the polynucleotide sequence for specific genomic regions of the known SARS viruses. Additionally, new SARS isolates may be identified by a percent homology of 99%, 95%, 92%, 90%, 85%, or 80% homology of the polypeptide sequence encoded by the polynucleotide of specific genomic regions of the new SARS virus to the polypeptide sequence encoded by the polynucleotides of specific regions of the known SARS virus. These genomic regions may include regions (e.g., gene products) which are typically in common among numerous coronaviruses, as well as group specific regions (e.g., antigenic groups), such as, for example, any one of the following genomic regions which could be readily identified by a virologist skilled in the art: 5′untranslated region (UTR), leader sequence, ORF1a, ORF1b, nonstructural protein 2 (NS2), hemagglutinin-esterase glycoprotein (HE) (also referred to as E3), spike glycoprotein (S) (also referred to as E2), ORF3a, ORF3b, ORF3x, nonstructural protein 4 (NS4), envelope (small membrane) protein (E) (also referred to as sM), membrane glycoprotein (M) (also referred to as E1), ORF5a, ORF5b, nucleocapsid phosphoprotein (N), ORF7a, ORF7b, intergenic sequences, 3′UTR, or RNA dependent RNA polymerase (pol). The SARS virus may have identifiable genomic regions with one or more the above-identified genomic regions. A SARS viral antigen includes a protein encoded by any one of these genomic regions. A SARS viral antigen may be a protein or a fragment thereof, which is highly conserved with coronaviruses. A SARS viral antigen may be a protein or fragment thereof, which is specific to the SARS virus (as compared to known cornaviruses). (See, FIGS. 1-5, FIGS. 8-11, SEQ ID NOS: 3-20).

[0161] One skilled in the art could also recognize electron microscopy of a SARS virus infected mammalian cell. Electron microscopy of SARS infected cells are shown in the Lancet paper. As discussed in the paper, electron microscopy of negative stained (3% potassium phospho-tungstate, pH 7.0) ultracentrifuged cell-culture extracts of SARS infected fetal rhesus kidney cells show the presence of pleomorphic enveloped virus particles of around 80-90 nm (range 70-130 nm) in diameter with surface morphology compatible with a coronavirus (see Lancet paper, FIG. 1). Thin-section electron microscopy of infected cells reveals virus particles of 55-90 nm diameter within smooth walled vesicles in the cytoplasm (see Lancet paper, FIG. 2B). Electron microscopy can also be used to observe virus particles at the cell surface. Electron microscopy of a human lung biopsy sample depicts similar viral morphology. See Lancet paper FIG. 2A.

I. SARS Polypeptides and Polynucleotides

[0162] The invention relates to nucleic acids and proteins from SARS virus. Such polynucleotides and polypeptides are exemplified further below.

[0163] In one embodiment, the polynucleotides of the invention do not include one of the following five primers, disclosed at http://content.nejm.org/cgi/reprint/NEJMoa030781v2.pdf: SEQ ID NOs: 6034-38.

[0164] The invention also includes polynucleotide sequences which can be used as probes for diagnostic reagents, kits (comprising such reagents) and methods which can be used to diagnose or identify the presence or absence of a SARS virus in a biological sample. The invention includes a polynucleotide sequence comprising one or more of the primer sequences identified in SEQ ID NOS: 21-1020. The invention further includes polynucleotide sequence comprising the complement of one or more of the primer sequences identified in SEQ ID NOS: 21-1020.

[0165] The invention includes a polypeptide sequence comprising an amino acid sequence from the sequence shown in FIG. 23. Such amino acid sequences are SEQ ID NOS: 6588-6809. The invention includes polypeptides comprising an amino acid sequence having sequence identity to these sequences, and the invention includes a fragment of a polypeptide comprising one of these sequences.

[0166] The invention includes a polypeptide comprising an amino acid sequence from the sequence shown in FIG. 24. Such amino acid sequences are SEQ ID NOS: 6810-7179. The invention includes a protein comprising an amino acid sequence having sequence identity to these sequences, and the invention includes a fragment of a protein comprising one of these sequences.

[0167] The invention includes a protein comprising SEQ ID NO: 6039. The invention includes a polypeptide comprising an amino acid sequence having sequence identity to SEQ ID NO: 6039. The invention includes a fragment of a polypeptide comprising SEQ ID NO: 6039. The invention includes a diagnostic kit comprising a polypeptide comprising SEQ ID NO: 6039, or a fragment thereof. The invention includes a diagnostic kit comprising a polynucleotide sequence encoding SEQ ID NO: 6039, or a fragment thereof. The invention includes an immunogenic composition comprising a polypeptide comprising SEQ ID NO: 6039, or a fragment thereof. The invention includes an antibody which recognizes a polypeptide comprising SEQ ID NO: 6039, or a fragment thereof. SEQ ID NO: 6039 demonstrates functional homology with ORF1a of coronaviruses.

[0168] Predicted transmembrane or hydrophobic regions of SEQ ID NO: 6039 are identified below. Although the polyprotein of coronaviruses is proteolytically cleaved into numerous smaller proteins, hydrophobic domains in the polyprotein are known to mediate the membrane association of the replication complex and to be able to dramatically alter the architecture of host cell membranes. Accordingly, the hydrophobic domains of the polyprotein are targets for genetic mutation to develop attenuated SARS virus vaccines. The hydrophobic domains are also targets for small molecule inhibitors of the SARS virus. The hydrophobic domains may also be used to generate antibodies specific to those regions to treat or prevent SARS virus infection.

Predicted Transmembrane Helices in SEQ ID NO: 6039

[0169] The sequence positions in brackets denominate the core region.

[0170] Only scores above 500 are considered significant.

| | | | |
|---|---|---|---|
| from | to | score | center |

Inside to outside helices: 43 found

| | | | |
|---|---|---|---|
| 100 (100) | 118 (116) | 103 | 107 |
| 473 (473) | 488 (488) | 1003 | 481 |
| 529 (532) | 549 (549) | 541 | 539 |
| 584 (584) | 606 (601) | 1049 | 594 |
| 773 (773) | 791 (789) | 514 | 782 |
| 1071 (1071) | 1089 (1086) | 243 | 1078 |
| 1121 (1121) | 1137 (1137) | 459 | 1130 |
| 1679 (1679) | 1696 (1696) | 404 | 1686 |
| 2098 (2102) | 2119 (2116) | 509 | 2109 |
| 2145 (2145) | 2160 (2160) | 797 | 2153 |
| 2206 (2209) | 2224 (2224) | 2686 | 2216 |
| 2316 (2316) | 2332 (2332) | 2123 | 2325 |
| 2335 (2339) | 2358 (2354) | 2101 | 2346 |
| 2373 (2373) | 2390 (2390) | 532 | 2380 |
| 2597 (2600) | 2615 (2615) | 307 | 2607 |
| 2753 (2753) | 2770 (2768) | 2242 | 2760 |
| 2831 (2833) | 2854 (2851) | 759 | 2841 |
| 2879 (2882) | 2900 (2897) | 526 | 2889 |
| 2990 (2996) | 3012 (3010) | 1289 | 3003 |
| 3024 (3024) | 3042 (3039) | 2281 | 3032 |
| 3054 (3058) | 3075 (3072) | 2536 | 3065 |
| 3105 (3109) | 3127 (3123) | 2010 | 3116 |
| 3143 (3143) | 3163 (3159) | 184 | 3152 |
| 3253 (3255) | 3272 (3272) | 319 | 3262 |
| 3346 (3346) | 3366 (3366) | 203 | 3356 |
| 3375 (3375) | 3392 (3392) | 305 | 3384 |
| 3438 (3438) | 3455 (3453) | 1021 | 3445 |
| 3559 (3567) | 3584 (3581) | 1885 | 3574 |
| 3589 (3589) | 3606 (3604) | 2018 | 3596 |
| 3611 (3611) | 3629 (3629) | 2304 | 3621 |
| 3659 (3659) | 3674 (3674) | 1561 | 3667 |
| 3756 (3758) | 3777 (3774) | 2352 | 3767 |
| 3890 (3890) | 3904 (3904) | 485 | 3897 |
| 3916 (3919) | 3934 (3934) | 241 | 3926 |
| 4035 (4035) | 4051 (4051) | 335 | 4044 |
| 4217 (4217) | 4232 (4232) | 272 | 4224 |
| 4239 (4239) | 4257 (4254) | 402 | 4247 |

Outside to inside helices: 43 found

| | | | |
|---|---|---|---|
| 94 (97) | 118 (112) | 291 | 104 |
| 400 (400) | 418 (415) | 243 | 407 |
| 473 (473) | 488 (488) | 1113 | 481 |
| 523 (528) | 548 (548) | 285 | 538 |
| 583 (583) | 606 (601) | 662 | 593 |
| 776 (776) | 791 (791) | 1435 | 783 |
| 1068 (1071) | 1089 (1086) | 370 | 1078 |
| 1121 (1121) | 1137 (1137) | 455 | 1130 |
| 1679 (1679) | 1696 (1694) | 340 | 1686 |
| 2098 (2098) | 2119 (2116) | 678 | 2109 |
| 2148 (2148) | 2163 (2163) | 434 | 2155 |
| 2208 (2210) | 2231 (2226) | 2389 | 2219 |
| 2309 (2309) | 2332 (2326) | 1773 | 2318 |
| 2342 (2342) | 2368 (2360) | 1666 | 2353 |
| 2373 (2373) | 2390 (2390) | 254 | 2380 |
| 2753 (2755) | 2770 (2770) | 2119 | 2763 |
| 2832 (2835) | 2854 (2851) | 687 | 2844 |
| 2858 (2858) | 2873 (2873) | 253 | 2866 |
| 2879 (2882) | 2899 (2899) | 400 | 2889 |
| 2990 (2990) | 3005 (3005) | 875 | 2998 |
| 3020 (3024) | 3042 (3042) | 2795 | 3032 |
| 3059 (3059) | 3075 (3075) | 2137 | 3067 |
| 3105 (3108) | 3127 (3123) | 1902 | 3115 |
| 3142 (3145) | 3162 (3162) | 540 | 3152 |
| 3343 (3351) | 3366 (3366) | 496 | 3358 |
| 3437 (3437) | 3453 (3453) | 848 | 3444 |
| 3489 (3491) | 3508 (3505) | 302 | 3498 |
| 3560 (3560) | 3577 (3577) | 1460 | 3569 |
| 3591 (3591) | 3606 (3606) | 2193 | 3598 |
| 3610 (3610) | 3627 (3627) | 1484 | 3620 |
| 3656 (3658) | 3678 (3675) | 1240 | 3668 |
| 3681 (3684) | 3701 (3699) | 590 | 3691 |
| 3710 (3713) | 3738 (3728) | 1696 | 3721 |
| 3723 (3723) | 3738 (3738) | 1670 | 3730 |
| 3760 (3760) | 3777 (3775) | 2367 | 3767 |
| 3881 (3884) | 3902 (3900) | 249 | 3892 |
| 4099 (4099) | 4114 (4114) | 389 | 4106 |
| 4234 (4234) | 4254 (4249) | 325 | 4241 |
| 4338 (4341) | 4360 (4360) | 505 | 4348 |

[0171] Accordingly, the invention includes a polypeptide comprising a fragment of SEQ ID NO: 6039, wherein said fragment comprises an amino acid sequence including one or more of the hydrophobic transmembrane sequences identified above. The invention includes a polypeptide comprising a fragment of SEQ ID NO: 6039 wherein said fragment comprises one or more of the following polypeptide sequences of SEQ ID NO: 6039: 473-488; 529-549, 584-606, 773-791, 2098-2119, 2145-2160, 2206-2224, 2316-2332, 2335-2358, 2373-2390, 2753-2770, 2831-2854, 2879-2990, 2990-3012, 3024-3042, 3054-3075, 3105-3127, 3438-3455, 3559-3584, 3589-3606, 3611-3629, 3659-3674, 3756-3777, 473-488, 583-606, 776-791, 2098-2119, 2208-2231, 2309-2332, 2342-2368, 2753-2770, 2832-2854, 2990-3005, 3020-3042, 3059-3075, 3105-3127, 3142-3162, 3437-3453, 3560-3577, 3591-3606, 3610-3627, 3656-3678, 3710-3738, 3723-3738, and 3760-3777. Preferably, the fragment comprises one or more of the following polypeptide sequences of SEQ ID NO: 6039: 2206-2224, 2316-2332, 2335-2358, 2753-2770, 3024-3042, 3054-3075, 3105-3127, 3589-3606, 3611-3629, 3756-3777, 2208-2231, 2753-2770, 3020-3042, 3059-3075, and 3591-3606. Preferably, the fragment comprises one or more of the following polypeptide sequences of SEQ ID NO: 6039: 2206-2224 and 3020-3042. The invention also includes polynucleotides encoding each of the polypeptide fragments identified above.

[0172] The invention includes an attenuated SARS virus wherein said attenuated SARS virus contains an addition, deletion or substitution in the polynucleotides encoding for one of the hydrophobic domains identified above. The invention also includes a method for creating an attenuated SARS virus comprising mutating a SARS virus by adding, deleting or substituting the viral genome of the SARS virus to alter the coding of one or more of the hydrophobic domains of SEQ ID NO: 6039 identified above.

[0173] The invention includes an antibody which specifically identifies one or more of the hydrophobic regions of SEQ ID NO: 6039 identified above. The invention includes a small molecule which binds to, interferes with the hydrophobicity of or otherwise disrupts one or more of the hydrophobic regions of SEQ ID NO: 6039 identified above.

[0174] Predicted N-glycosylation sites of SEQ ID NO: 6039 are identified in the chart below.

[0175] Prediction of N-glycosylation Sites in SEQ ID NO: 6039

| | | | | Jury | NGlyc | |
|---|---|---|---|---|---|---|
| Position | | | Potential | agreement | result | |
| 48 | NGTC | SEQ ID NO: 7180 | 0.6371 | (7/9) | + | |
| 389 | NHSN | SEQ ID NO: 7181 | 0.6132 | (6/9) | + | |
| 916 | NFSS | SEQ ID NO: 7182 | 0.5807 | (7/9) | + | |
| 1628 | NHTK | SEQ ID NO: 7183 | 0.5610 | (7/9) | + | |
| 1696 | NKTV | SEQ ID NO: 7184 | 0.5297 | (5/9) | + | |
| 2031 | NPTI | SEQ ID NO: 9764 | 0.5299 | (5/9) | + | WARNING: PRO- |
| | | | | | | X1. |
| 2249 | NSSN | SEQ ID NO: 7185 | 0.6329 | (9/9) | ++ | |
| 2459 | NPTD | SEQ ID NO: 9765 | 0.5599 | (6/9) | + | WARNING: PRO- |
| | | | | | | X1. |
| 2685 | NVSL | SEQ ID NO: 7186 | 0.6071 | (8/9) | + | |
| 4233 | NATE | SEQ ID NO: 7187 | 0.6144 | (7/9) | + | |

[0176] Accordingly, the invention comprises a fragment of SEQ ID NO: 6039 wherein said fragment comprises an amino acid sequence which includes one or more of the N-glycosylation sites identified above. Preferably, the fragment comprises one or more sequences selected from the group consisting of SEQ ID NOS: 7180-7187 & 9764-9765. Preferably, the fragment comprises the amino acid sequence NSSN (SEQ ID NO: 7185).

[0177] The invention includes a polypeptide comprising a fragment of SEQ ID NO: 6039 wherein said fragment does not include one or more of the glycosylation sites identified above. The invention also includes a polynucleotide encoding such a polypeptide.

[0178] T-epitopes for SEQ ID NO: 6039 are identified in Table 13. The invention includes a polypeptide for use as an antigen, wherein the polypeptide comprises: (a) an amino acid sequence selected from the group consisting of the T-epitope sequences identified as SEQ ID NOS: 7400-7639; (b) an amino acid sequence having sequence identity to an amino acid sequence of (a). The invention further comprising a polynucleotide sequence encoding the polypeptides of (a) or (b). The invention further comprising a method of expression or delivery of such polynucleotides through viral vectors and/or viral particles. The invention further comprises a polypeptide comprising two or more of the T-epitope sequences identified as SEQ ID NOS: 7400-7639, or a polynucleotide encoding such a polypeptide.

[0179] The use as an antigen is preferably a use: (1) as a T-cell antigen; (2) for generating a complex between a class I MHC protein (e.g. a class I HLA) and a fragment of said antigen; (3) as an antigen for raising a cell-mediated immune response; and/or (4) as an antigen for raising a CTL response. The use preferably protects or treats disease and/or infection caused by a SARS virus.

[0180] The invention provides the use of a polypeptide in the manufacture of a medicament for immunising a mammal (typically a human) against SARS viral infection wherein the polypeptide is as defined above.

[0181] The invention provides a method of raising an immune response in a mammal (typically a human), comprising the step of administering to the mammal a polypeptide as defined above, wherein said immune response is a cell-mediated immune response and, preferably, a CTL response. The immune response is preferably protective or therapeutic.

[0182] The ORF1a and ORF1b sequences of coronaviruses are typically translated as a single ORF1ab polyprotein. Slippage of the ribosome during translation generates an a-1 frameshift. One region of such slippage is illustrated below:

```
      gggttttacacttagaaacacagtctgtaccgtctgcggaatgtggaaaggttatggctgtagttgtga
+1 G F T L R N T V C T V C G M W K G Y G C S C D
+3 G F Y T - K H S L Y R L R N V E R L W L - L -
      ccaactccgcgaacccttgatgcagtctgcggatgcatcaacgtttttaaacgggtttgcggtgtaagt
+1 Q L R E P L M Q S A D A S T F L N G F A V - V
+3 P T P R T L D A V C G C I N V F K R V C G V S
      gcagcccgtcttacaccgtgcggcacaggcactagtactg (SEQ ID NO: 7224)
+1 Q P V L H R A A Q A L V L (SEQ ID NOS: 7225-7226)
+3 A A R L T P C G T G T S T (SEQ ID NOS: 7227-7229)
```

[0183] which would generate the following translational slippage (SEQ ID NOS: 7230-7231):

ccaactccgcgaacccttgatgcagtctgcggatgcatcaacgtttttaaacgggtttgcggtgtaagt
Q L R E P L M Q S A D A S T F L N R V C G V S

[0184] Accordingly, the invention includes a polypeptide comprising SEQ ID NO: 7232. The invention includes a polypeptide comprising an amino acid sequence having sequence identity to SEQ ID NO: 7232. The invention includes a fragment of a polypeptide comprising SEQ ID NO: 7232 The invention includes a diagnostic kit comprising a polypeptide comprising SEQ ID NO: 7232 or a fragment thereof. The invention includes a diagnostic kit comprising a polynucleotide sequence encoding SEQ ID NO: 7232 or a fragment thereof. The invention includes an immunogenic composition comprising a polypeptide comprising SEQ ID NO: 7232 or a fragment thereof. The invention includes an antibody which recognizes a polypeptide comprising SEQ ID NO: 7232 or a fragment thereof.

[0185] The invention also includes a polypeptide comprising amino acid sequence X₁—X₂—X₃, where X₁ is SEQ ID NO: 7233, X₂ is from one to ten amino acids, and X₃ is SEQ ID NO: 7234. X₂ can comprise any sequence of one to ten amino acids (SEQ ID NOS: 7235-7244) but, in preferred embodiments, X₂ is selected from the group consisting of F, FL, FLN, FLNR (SEQ ID NO: 7245), FLNRV (SEQ ID NO: 7246) and FLNRVC (SEQ ID NO: 7247). Preferably, X₂ is SEQ ID NO: 7247. These preferred embodiments are shown as SEQ ID NOS: 7248-7253.

[0186] The invention includes a polypeptide comprising an amino acid sequence having sequence identity to said amino acid sequences X₁—X₂—X₃. The invention includes a fragment of a polypeptide comprising said amino acid sequences X₁—X₂—X₃. The invention includes a diagnostic kit comprising a polypeptide comprising said amino acid sequences X₁—X₂—X₃ or a fragment thereof. The invention includes a diagnostic kit comprising a polynucleotide sequence encoding said amino acid sequences X₁—X₂—X₃ or a fragment thereof. The invention includes an immunogenic composition comprising a polypeptide comprising said amino acid sequences X₁—X₂—X₃ or a fragment thereof. The invention includes an antibody which recognizes a polypeptide comprising said amino acid sequences X₁—X₂—X₃ or a fragment thereof.

[0187] The amino acid sequences X₁—X₂—X₃ (i.e. SEQ ID NOS: 7235-7244) demonstrate functional homology with the polyprotein of murine hepatitis virus. This polyprotein is cleaved to produce multiple proteins. Proteins which can be generated from the X₁—X₂—X₃ polyprotein, where X₂ is six amino acids (SEQ ID NO: 7240) are listed below.

| | | Coordinates in |
|---|---|---|
| Mouse virus protein | Coordinates in Mouse virus | SEQ ID NO: 7240 |
| Nsp2 | 3334-3636 | 3241-3546 |
| Nsp3 | 3637-3923 | 3547-3836 |
| Nsp4 | 3924-4015 (or 4012) | 3837-3919 |
| Nsp5 | 4016 (or 4013)-4209 | 3920-4117 |
| Nsp6 | 4210-4319 | 4118-4230 |
| Nsp7 | 4320-4456 | 4231-4369 |
| Nsp9 | 4457-5384 | 4370-5301 |
| Nsp10 | 5385-5984 | 5302-5902 |
| Nsp11 | 5985-6505 | 5903-6429 |
| Nsp12 | 6506-6879 | 6430-6775 |
| Nsp13 | 6880-7178 | 6776-7073 |

[0188] The invention includes a fragment of the amino acid sequence X₁—X₂—X₃ (i.e. SEQ ID NOS: 7235-7244) wherein the fragment comprises one of the polypeptide sequences identified in the above table. The invention further includes a fragment of the amino acid sequence X₁—X₂—X₃ wherein said fragment comprises a polypeptide sequence which has a serine at its N-terminus and a glutamine at its C-terminus. The invention further includes a fragment of the amino acid sequence X₁—X₂—X₃ wherein said fragment comprises a polypeptide sequence which has an Alanine at its N-terminus and a glutamine at its C-terminus. The invention further includes a fragment of the amino acid sequence X₁—X₂—X₃ wherein said fragment comprises a polypeptide sequence which has a Asparagine at its N-terminus and a glutamine at its C-terminus. The invention further includes a fragment of the amino acid sequence X₁—X₂—X₃ wherein said fragment comprises a Cysteine at its N-terminus and a Glutamine at its C-terminus. Each of the fragments identified above can be used in fusion proteins.

[0189] The invention includes a diagnostic kit comprising a polypeptide comprising at least one of the fragments of the amino acid sequence X₁—X₂—X₃ (i.e. SEQ ID NOS: 7235-7244) identified in the above paragraph. The invention includes a diagnostic kit comprising a polynucleotide sequence encoding at least one of the fragments of the amino acid sequence X₁—X₂—X₃ identified in the above paragraph. The invention includes an immunogenic composition comprising a polypeptide comprising at least one of the fragments of the amino acid sequence X₁—X₂—X₃ identified in the above paragraph. The invention includes an antibody which recognizes a polypeptide comprising at least one of the fragments of the amino acid sequence X₁—X₂—X₃ identified in the above paragraph.

[0190] Predicted N-glycosylation sites of the amino acid sequence X₁—X₂—X₃ when X₂ is six amino acids are identified at the asparagines located at the following amino acid positions 48; 389; 556; 916; 1628; 1696; 1899; 2079; 2249; 2252; 2507; 2685; 3303; 3373; 3382; 3720; 4150; 4233; 4240; 5016; 5280; 5403; 5558; 5650; 5905; 6031; 6130; 6474; 6918; 6973. Accordingly, the invention comprises a fragment of SEQ ID NO: 7239 wherein said fragment is at least ten amino acids and wherein said fragment comprises one or more of the asparagines from the amino acid positions of SEQ ID NO: 7239 selected from the group consisting of 8; 389; 556; 916; 1628; 1696; 1899; 2079; 2249; 2252; 2507; 2685; 3303; 3373; 3382; 3720; 4150; 4233; 4240; 5016; 5280; 5403; 5558; 5650; 5905; 6031; 6130; 6474; 6918; and 6973.

[0191] A zinc binding region 2 site within SEQ ID NOS: 7235-7244 is identified at amino acid residues 2102-2112 (SEQ ID NO: 7254 HGIAAINSVPW). The polypeptide of SEQ ID NOS: 7235-7244 will be processed by the SARS virus into multiple peptides. This zinc binding region falls within the nsp1 region of the polypeptide. SEQ ID NO: 7254 is a target for screening of chemical inhibitors to the SARS virus. The invention includes a polypeptide comprises SEQ ID NO: 7254. The invention includes a polynucleotide encoding the polypeptide sequence of SEQ ID NO: 7254. The invention includes a method of screening SEQ ID NO: 7254 for an inhibitor. The invention includes the recombinant expression of SEQ ID NO: 7254 in a host cell. The invention includes a fragment of SEQ ID NOS: 7235-7244, wherein said fragment comprises SEQ ID NO: 7254. The invention includes a polypeptide comprising SEQ ID NO: 7254 wherein said polypeptide is complexed with a zinc ion. The invention includes a small molecule which prevents a zinc ion from complexing with the polypeptide of SEQ ID NO: 7254. The invention includes a fusion protein wherein said fusion protein comprises SEQ ID NO: 7254.

[0192] The polyprotein encoded by the SARS virus will contain at least two protease domains: a papain-like cystein protease (PLP) and a chymotrypsin-picornavirus 3C-like protease (3CLp). (There may be more than one copy of the PLP domain). These proteases function to cleave the polyprotein into multiple smaller proteins. The 3C-like protease, also known as the “main protease” or Mpro, is itself cleaved from the polyprotein by its own autoprotease activity. See generally, Chapter 35 of Fields Virology (2nd ed), Fields et al. (eds.), B.N. Raven Press, New York, N.Y., and Anand et al., EMBO Journal (2002) 21 (13): 3213-3224. This 3CLp generally corresponds with the Nsp2 region identified above.

[0193] The SARS virus 3CLp protein is further characterized by SEQ ID NO: 6569 (also SEQ ID NO: 9769), as shown in FIG. 15.

[0194] FIG. 16 also illustrates the SARS virus 3CLp, in allignment with the 3CLp of avian infectious bronchitis (IBV; SEQ ID NO: 6570), mouse hepatitis virus (MHV; SEQ ID NO: 6571), and bovine coronavirus (BCoV; SEQ ID NO: 6572). Accordingly, the invention includes a polypeptide sequence comprising SEQ ID NO: 6569, or a fragment thereof, or a polypeptide sequence having sequence identity thereto. The invention further includes a polynucleotide sequence encoding SEQ ID NO: 6569, or a fragment thereof. The invention includes a polynucleotide sequence encoding a polypeptide sequence having sequence identity to SEQ ID NO: 6569.

[0195] The invention further includes a method of screening for an inhibitor of the SARS virus 3CLp protein. In one embodiment, the invention includes a method of screening for an inhibitor of SEQ ID NO: 6569. The invention includes a method of recombinantly expressing the SARS virus 3CLp protein in a host cell. The invention includes a method of recombinantly expressing a polypeptide sequence comprising SEQ ID NO: 6569 or an enzymatically active fragment thereof or a polypeptide sequence having sequence identity thereto. The invention includes a small molecule which inhibits or reduces the proteolytic activity of the SARS virus 3CLp protein. The invention includes a small molecule which inhibits or reduced the proteolytic activity of the polypeptide comprising SEQ ID NO: 6569.

[0196] Catalytic residues of the SARS virus 3CLp are identified in FIG. 15 and 16. Specifically, a catalytic histidine and a catalytic cysteine are identified. Such catalytic sites are targets for small molecules which could inhibit or reduce the protease activity of 3CLp. Accordingly, the invention includes a polypeptide comprising a fragment of SEQ ID NO: 6569, wherein said fragment comprises at least one catalytic site. Preferably, the catalytic site is selected from the group consisting of the indicated catalytic histidine and the catalytic cysteine in FIG. 15 and 16. The invention includes a polynucleotide encoding a polypeptide, wherein said polypeptide comprises a fragment of SEQ ID NO: 6569, wherein said fragment comprises at least one catalytic site. Preferably, the catalytic site is selected from the group consisting of the indicated catalytic histidine and the catalytic cysteine.

[0197] The invention further includes a method of screening a compound library to identify a small molecule which inhbits a catalytic site of a SARS virus 3CLp. Preferably, the 3CLp comprises SEQ ID NO: 6569, or a fragment thereof, or a sequence having sequence identity thereto. The catalytic site is preferably selected from the group consisting of the indicated catalytic histidine and the catalytic cysteine in FIG. 15 and 16.

[0198] The invention includes a small molecule which inhibits the catalytic site of a SARS virus 3CLp. Preferably, the 3CLp comprises SEQ ID NO: 6569, or a fragment thereof, or a sequence having sequence identity thereto. The catalytic site is preferably selected from the group consisting of the indicated catalytic histidine and the catalytic cysteine in FIG. 15 and 16.

[0199] Residues of the substrate site of the SARS virus 3CLp are identified in FIG. 15 and 16. Specifically, a substrate site is indicated at a phenylalanine, a tyrosine and a histidine. Such substrate sites are targets for small molecules which could inhibit or reduce the protease activity of 3CLp. Accordingly, the invention includes a polypeptide comprising a fragment of SEQ ID NO: 6569, wherein said fragment comprises at least one substrate site. Preferably, the substrate site is selected from the group consisting of the indicated substrate phenylalanine, tyrosine and histidine in FIG. 15 and 16. The invention includes a polynucleotide encoding a polypeptide, wherein said polypeptide comprises a fragment of SEQ ID NO: 6569, wherein said fragment comprises at least one substrate site. Preferably, the substrate site is selected from the group consisting of the indicated substrate phenylalanine, tyrosine and histidine in FIG. 15 and 16.

[0200] The invention further includes a method of screening a compound library to identify a small molecule which blocks a substrate site of a SARS virus 3CLp. Preferably, the 3CLp comprises SEQ ID NO: 6569, or a fragment thereof, or a sequence having sequence identity thereto. The substrate site is preferably selected from the group consisting of the indicated substrate phenylalanine, tyrosine and histidine in FIG. 15 and 16.

[0201] The invention includes a small molecule which inhibits the substrate site of a SARS virus 3CLp. Preferably, the 3CLp comprises SEQ ID NO: 6569, or a fragment thereof, or a sequence having sequence identity thereto. The substrate site is preferably selected from the group consisting of the indicated substrate phenylalanine, tyrosine and histidine in FIG. 15 and 16.

[0202] The invention further includes a diagnostic kit comprising a polynucleotide encoding a SARS virus 3CLp or a fragment thereof. Preferably, the SARS virus 3CLp comprising SEQ ID NO: 6569 or a fragment thereof or a polypeptide sequence having sequence identity thereto. Preferably, the fragment comprising one or more sites selected from the group consisting of a catalytic site and a substrate site. Preferably, the catalytic site is selected from the group consisting of one or more of the sites identified in FIG. 15 and 16. Preferably, the substrate site is selected from the group consisting of one or more of the sites identified in FIG. 15 and 16.

[0203] The invention further comprises a diagnostic kit comprising an antibody specific to a SARS virus 3CLp or a fragment thereof. Preferably, the antibody is specific to the polypeptide comprising SEQ ID NO: 6569 or a fragment thereof or a polypeptide sequence having sequence identity thereto. Preferably, the antibody is specific to one or more sites of a SARS virus 3CLp selected from the group consisting of a catalytic site and a substrate site. Preferably, the catalytic site is selected from the group consisting of one or more of the sites identified in FIG. 15 and 16. Preferably, the substrate site is selected from the group consisting of one or more of the sites identified in FIG. 15 and 16.

[0204] The invention includes a polypeptide comprising an amino acid sequence from the sequence shown in FIG. 25. The two amino acid sequences within FIG. 25, separated by a *, are SEQ ID NOS: 7188 & 7189. The invention includes a polypeptide comprising an amino acid sequence having sequence identity to the FIG. 25 translation. The invention includes a fragment of a polypeptide comprising the FIG. 25 sequence. The invention includes a diagnostic kit comprising a polypeptide comprising the FIG. 25 translation, or a fragment thereof. The invention includes a diagnostic kit comprising a polynucleotide sequence encoding the FIG. 25 translation, or a fragment thereof. The invention includes an immunogenic composition comprising a polypeptide comprising the FIG. 25 translation, or a fragment thereof. The invention includes an antibody which recognizes a polypeptide comprising the FIG. 25 sequence, or a fragment thereof. The FIG. 25 sequence demonstrates functional homology with ORF1b of coronaviruses.

[0205] SEQ ID NO: 7188 is an open reading frame within FIG. 25. The invention includes a polypeptide comprising SEQ ID NO: 7188. The invention includes a polypeptide comprising an amino acid sequence having sequence identity to SEQ ID NO: 7188. The invention includes a fragment of a polypeptide comprising SEQ ID NO: 7188. The invention includes a diagnostic kit comprising a polypeptide comprising SEQ ID NO: 7188, or a fragment thereof. The invention includes a diagnostic kit comprising a polynucleotide sequence encoding SEQ ID NO: 7188, or a fragment thereof. The invention includes an immunogenic composition comprising a polypeptide comprising SEQ ID NO: 7188, or a fragment thereof. The invention includes an antibody which recognizes a polypeptide comprising SEQ ID NO: 7188, or a fragment thereof.

[0206] SEQ ID NO: 7190 is an open reading frame within SEQ ID NO: 7188. The invention includes a polypeptide comprising SEQ ID NO: 7190, a fragment thereof or a polypeptide having sequence identity thereto. The invention further includes a polynucleotide encoding SEQ ID NO: 7190, a fragment thereof or a polypeptide sequence having sequence identity thereto. An example of a polynucleotide encoding SEQ ID NO: 7190 is given as SEQ ID NO: 7191.

[0207] SEQ ID NO: 7188 also contains an open reading frame comprising SEQ ID NO: 6042. The invention includes a polypeptide comprising SEQ ID NO: 6042. The invention includes a polypeptide comprising an amino acid sequence having sequence identity to SEQ ID NO: 6042. The invention includes a fragment of a polypeptide comprising SEQ ID NO: 6042. The invention includes a diagnostic kit comprising a polypeptide comprising SEQ ID NO: 6042, or a fragment thereof. The invention includes a diagnostic kit comprising a polynucleotide sequence encoding SEQ ID NO: 6042, or a fragment thereof. The invention includes an immunogenic composition comprising a polypeptide comprising SEQ ID NO: 6042, or a fragment thereof. The invention includes an antibody which recognizes a polypeptide comprising SEQ ID NO: 6042, or a fragment thereof. SEQ ID NO: 6042 demonstrates functional homology to a coronavirus spike protein.

[0208] Predicted transmembrane regions of SEQ ID NO: 6042 are identified below.

Predicted Transmembrane Helices of SEQ ID NO: 6042

[0209] The sequence positions in brackets denominate the core region.

[0210] Only scores above 500 are considered significant.

| | | | |
|---|---|---|---|
| from | to | score | center |

Inside to outside helices: 18 found

| | | | |
|---|---|---|---|
| 1 (1) | 16 (16) | 959 | 9 |
| 233 (237) | 257 (252) | 905 | 244 |
| 345 (347) | 364 (361) | 490 | 354 |
| 345 (354) | 369 (369) | 420 | 362 |
| 497 (497) | 513 (513) | 239 | 506 |
| 573 (573) | 588 (588) | 811 | 580 |
| 645 (648) | 666 (663) | 302 | 656 |
| 690 (696) | 714 (711) | 428 | 704 |
| 857 (860) | 882 (874) | 1508 | 867 |
| 1031 (1031) | 1046 (1046) | 446 | 1039 |
| 1199 (1203) | 1219 (1217) | 2667 | 1210 |

Outside to inside helices: 13 found

| | | | |
|---|---|---|---|
| 1 (1) | 17 (17) | 684 | 10 |
| 222 (222) | 240 (237) | 238 | 229 |
| 244 (247) | 264 (264) | 613 | 254 |
| 349 (355) | 369 (369) | 314 | 362 |
| 496 (496) | 511 (511) | 488 | 503 |
| 573 (573) | 591 (591) | 712 | 581 |
| 650 (652) | 666 (666) | 474 | 659 |
| 674 (679) | 702 (696) | 190 | 686 |
| 691 (696) | 713 (711) | 210 | 704 |
| 866 (868) | 886 (886) | 1172 | 876 |
| 1198 (1201) | 1215 (1215) | 3221 | 1208 |

[0211] SEQ ID NO: 6042, the spike protein, is a surface exposed polypeptide. Recombinant expression of a protein can be hindered by hydrophobic transmembrane regions. Accordingly, the invention includes a polypeptide comprising SEQ ID NO: 6042 wherein one or more of the hydrophobic regions identified above is removed. The invention further includes a polynucleotide encoding such a polypeptide. The invention includes recombinantly expressing the protein in a host cell. Primers for amplifying the gene for spike protein and fragments thereof, such as fragments encoding the soluble ectodomain, include SEQ ID NOS: 9753-9763 (Xiao et al. (2003) Biochem Biophys Res Comm 312:1159-1164).

[0212] Further characterization of SEQ ID NO: 6042 is set forth below.

```
PSORT --- Prediction of Protein Localization Sites
version 6.4(WWW)
SEQ ID NO: 6042 - 1255 Residues
Species classification: 4
*** Reasoning Step: 1
Preliminary Calculation of ALOM (threshold: 0.5)
        count: 2
        Position of the most N-terminal TMS: 496 at i = 2
MTOP: membrane topology (Hartmann et al.)
        I(middle): 503 Charge diffirence(C − N): 1.0
McG: Examining signal sequence (McGeoch)
        Length of UR:  13
        Peak Value of UR:  3.28
        Net Charge of CR: 0
        Discriminant Score:  8.66
GvH: Examining signal sequence (von Heijne)
        Signal Score (−3.5): 5.94
        Possible cleavage site: 13
>>> Seems to have a cleavable N-term signal seq.
Amino Acid Composition of Predicted Mature Form:
      calculated from 14
ALOM new cnt: 1 ** thrshld changed to −2
Cleavable signal was detected in ALOM?: 0B
ALOM: finding transmembrane regions (Klein et al.)
        count: 1  value: −12.26  threshold: −2.0
```

| | |
|---|---|
| INTEGRAL | Likelihood = −12.26 Transmembrane 1202-1218 (1194-1228) |
| PERIPHERAL | Likelihood = 0.16 |

```
        modified ALOM score:  2.55
>>> Seems to be a Type Ia membrane protein
        The cytoplasmic tail is from 1219 to 1255 (37 Residues)
Rule: vesicular pathway
Rule: vesicular pathway
Rule: vesicular pathway
(14) or uncleavable?
Gavel: Examining the boundary of mitochondrial targeting seq.
          motif at: 14
        Uncleavable? Ipos set to: 24
Discrimination of mitochondrial target seq.:
        positive (2.18)
Rule: vesicular pathway
Rule: vesicular pathway
Rule: vesicular pathway
*** Reasoning Step: 2
KDEL  Count: 0
Checking apolar signal for intramitochondrial sorting
    (Gavel position 24)  from: 1  to: 10  Score: 8.0
SKL motif (signal for peroxisomal protein):
        pos: 964(1255), count: 1 SRL
        SKL score (peroxisome): 0.1
Amino Acid Composition Tendency for Peroxisome: 1.37
        AAC not from the N-term., score modified
Peroxisomal proteins? Status: notclr
        AAC score (peroxisome): 0.079
Amino Acid Composition tendency for lysosomal proteins
        score: 0.39 Status: notclr
GY motif in the tail of typeIa? (lysosomal)
Checking the amount of Basic Residues (nucleus)
Checking the 4 residue pattern for Nuclear Targeting
Checking the 7 residue pattern for Nuclear Targeting
Checking the Robbins & Dingwall consensus (nucleus)
Checking the RNA binding motif (nucleus or cytoplasm)
Nuclear Signal  Status: negative (0.00)
Type Ia is favored for plasma memb. proteins
Checking the NPXY motif..
Checking the YXRF motif..
Checking N-myristoylation..
----- Final Results -----
plasma membrane --- Certainty = 0.460(Affirmative) <succ>
microbody (peroxisome) --- Certainty = 0.171(Affirmative) <succ>
endoplasmic reticulum (membrane) --- Certainty = 0.100(Affirmative) <succ>
endoplasmic reticulum (lumen) --- Certainty = 0.100(Affirmative) <succ>
```

[0213] SEQ ID NO: 6042 appears to have a N-terminus signaling region, followed by a surface exposed region, followed by a transmembrane region followed by a C-terminus cytoplasmic domain region. Accordingly, the invention includes an immunogenic, surface exposed fragment of SEQ ID NO: 6042. Preferably, said fragment comprises an amino acid sequence which does not include the last 50 amino acids of the C-terminus of SEQ ID NO: 6042. Preferably, said fragment comprises an amino acid sequence which does not include the last 70 amino acids of the C-terminus of SEQ ID NO: 6042. Preferably, said fragment does not include a transdomain region of SEQ ID NO: 6042. Preferably, said fragment does not include a C-terminus cytoplasmic domain of SEQ ID NO: 6042. Preferably, said fragment does not include a N-terminus signal sequence. Preferably, said fragment does not include amino acids 1-10 of the N-terminus of SEQ ID NO: 6042. Preferably, said fragment does not include amino acids 1-14 of the N-terminus of SEQ ID NO: 6042. Two oligopeptide fragments of SEQ ID NO: 6042 that are able to elicit anti-spike antibodies are SEQ ID NOS: 7398 & 7399, as described (with additional C-terminus cysteines) by Xiao et al. (2003) Biochem Biophys Res Comm 312:1159-1164. C-terminal truncations of spike protein, with removal of part of the cytoplasmic region, or removal up to and including the transmembrane region, are described by Yang et al. (2004) Nature 428:561-564.

[0214] A variant of SEQ ID NO: 6042 that is included within the invention is SEQ ID NO: 9962. Compared to SEQ ID NO: 6042, this sequence has Ser at residue 581 instead of Ala, and has Phe at residue 1152 instead of Leu.

[0215] The spike protein of coronaviruses may be cleaved into two separate chains into S1 and S2. The chains may remain associated together to form a dimer or a trimer. Accordingly, the invention includes a polypeptide comprising SEQ ID NO: 6042 wherein said polypeptide has been cleaved into S1 and S2 domains. The invention further includes a polypeptide comprising SEQ ID NO: 6042 wherein amino acids 1-10, preferably amino acids 1-14 of the N-terminus are removed and further wherein SEQ ID NO: 6042 is cleaved into S1 and S2 domains. Preferably the polypeptide is in the form of a trimer.

[0216] The spike protein appears to form an alpha-helical structure in the transmembrane region of the protein, preferably in the S2 domain. This alpha-helical structure is thought to associate with at least two additional spike proteins to form a trimer. Helical or coiled regions of the spike protein are identified below. Predicted coiled-coils of SEQ ID NO: 6042 (spike protein) are at amino acids 900-1005 and 1151-1185 (see FIG. 12).

[0217] Accordingly, the invention comprises a polypeptide sequence comprising a fragment of SEQ ID NO: 6042 wherein said fragment includes a coiled region of SEQ ID NO: 6042. Said fragment preferably includes the amino acid sequences selected from the group consisting of amino acid positions 900 to 1005 and amino acid positions 1151 to 1185 of SEQ ID NO: 6042. The invention comprises a polypeptide sequence comprising a fragment of SEQ ID NO: 6042, wherein said fragment does not include a coiled region of SEQ ID NO: 6042. Said fragment preferably includes the amino acid sequences selected from the group consisting of amino acid positions 900 to 1005 and amino acid positions 1151 and 1185 of SEQ ID NO: 6042.

[0218] The spike protein is believed to play an integral role in fusion and infection of Coronaviruses with mammalian host cells. Analysis of coronavirus spike proteins as well as similar surface proteins in other viruses has identified at least two structural motifs, typically located within the S2 domain, associated with this fusion event: heptad repeats (HR) and membrane fusion peptides.

[0219] At least two 4,3 hydrophobic heptad repeat (HR) domains are typically found in the ectodomain of the S2 domain of Coronaviruses. One heptad repeat region (HR1) is typically located adjacent to a fusion peptide while a second heptad region (HR2) is typically located near the C-terminus of the S2 domain, close to the transmembrane anchor. Heptad repeats are characteristic of coiled-coil structures and the heptad repeats found in viral surface proteins (such as coronavirus spike protein) are thought to form bundled helix structures which are involved in viral entry. See Bosch et al., J. Virology (2003) 77:8801-8811 (FIG. 1B of this reference illustrates an alignment of the HR1 and HR2 regions of five coronaviruses along with SARS, annotated “HCov-SARS”).

[0220] Heptad repeats generally contain a repeating structure of seven amino acids, designated a-b-c-d-e-f-g, where hydrophobic sidechains of residues a and d typically form an apolar stripe, and electrostatic interactions are found in residues e and g. Position a is most frequently Leu, Ile or Ala and position d is usually Leu or Ala. Residues e and g are often Glu or Gln, with Arg and Lys also prominent at position g. Charged residues are common to positions b, c and f as these residues may be in contact with solvent. Exceptions to these general parameters are known. For instance Pro residues are sometimes found within the heptad.

[0221] The HR1 and HR2 sequences of an MHV strain have been postulated to assemble into a thermostable, oligomeric, alphahelical rold-like complex, with the HR1 and HR2 helices oriented in an antiparallel manner. Id. In this same study, HR2 was asserted to be a strong inhitibor of both virus entry into the cell and cell-cell fusion.

[0222] HR1 and HR2 sequences have been identified in the SARS virus genome. The SARS virus HR1 region comprises approximately amino acids 879 to 1005 of SEQ ID NO: 6042 or fragments thereof capable of forming at least one alpha-helical turn. Preferably, said fragments comprise at least 7 (e.g., at least 14, 21, 28, 35, 42, 49 or 56) amino acid residues. SEQ ID NO: 7192, includes amino acids 879 to 1005 of SEQ ID NO: 6042.

[0223] A preferred fragment of HR1 comprises amino acid residues 879 to 980 of SEQ ID NO: 6042. This preferred fragment is SEQ ID NO: 7193.

[0224] Another preferred fragment of HR1 comprises amino acid residues 901 to 1005 of SEQ ID NO: 6042. This preferred fragment is SEQ ID NO: 7194.

[0225] The SARS virus HR2 region comprises approximately amino acids 1144 to 1201 of SEQ ID NO: 6042, or fragments thereof capable of forming at least one alpha-helical turn. Preferably, said fragments comprise at least 7 (e.g., at least 14, 21, 28, 35, 42, 49 or 56) amino acid residues. SEQ ID NO: 7195 includes amino acids 1144 to 1201. A preferred fragment of HR2 comprises amino acids 1144 to 1195 of SEQ ID NO: 6042. This preferred fragment is SEQ ID NO: 7196.

[0226] Membrane Fusion peptides sequences within the spike protein are also believed to participate in fusion (and infection) of the virus with a host cell. Fusion peptides generally comprise about 16 to 26 amino acid residues which are conserved within viral families. These Membrane Fusion peptides are relatively hydrophobic and generally show an asymmetric distribution of hydrophobitiy when modeled into an alpha helix. They are also generally rich in alanine and glycine.

[0227] At least three hydrophobic Membrane Fusion peptide regions have been identified within coronaviruses (PEP1, PEP2, and PEP3). See, Luo et al., “Roles in Cell-Cell Fusion of Two Conserved Hydrophobic Regions in the Murine Coronavirus Spike Protein”, Virology (1998) 244:483-494. FIG. 1 of this paper shows an alignment of Membrane Fusion peptide sequences of Mouse Hepatitis Viris, Bovine Corona Virus, Feline Infectious Peritonitis Virus, Transmissible Gastroenteritis Virus and Infectious Bronchitis Virus. See also, Bosch et al., “The Coronavirus Spike Protein is a Class I Virus Fusion Protein: Structural and Functional Characterization of the Fusion Core Complex” Journal of Virology (2003) 77(16):8801-8811.

[0228] PEP1 (SEQ ID NO: 7197), PEP2 (SEQ ID NO: 7198) and PEP3 (SEQ ID NO: 7199) sequences within the SARS spike protein have been identified.

[0229] The coronavirus spike proteins (and other similar surface viral proteins) are thought to undergo a conformational change upon receptor binding to the target cell membrane. One or more of the hydrophobic Membrane Fusion peptides are thought to become exposed and inserted into the target membrane as a result of this conformational change. The free energy released upon subsequent refolding of the spike protein to its most stable conformation is believed to play a role in the merger of the viral and cellular membranes.

[0230] One or more SARS HR sequences, preferably HR2, or a fragment thereof may be used to inhibit viral entry and membrane fusion with a target mammalian host cell. The invention provides a method of inhibiting viral infection comprising administering a composition comprising one or more SARS HR polypeptides or a fragment thereof. Preferably, the composition comprises a SARS HR2 sequence.

[0231] In another embodiment, the invention includes a composition comprising a SARS HR1 sequence, or a fragment thereof and a SARS HR2 sequence, or a fragment thereof. The HR1 and HR2 sequences may optionally be associated together in an oligomer. The composition may comprise the intermediate domain sequence between the HR1 and HR2 domains. The use of such an intermediate sequence may facilitate oligomerization or other structural interaction between the HR regions.

[0232] HR sequences for use in the invention may be produced recombinantly by methods known in the art. The SARS HR sequences may be modified to facilitate bacterial expression. In particular, the HR sequences may be modified to facilitate transport of the recombinant protein to the surface of the bacterial host cell. For example, leader sequences to a bacterial membrane protein may be added to the N terminus of the recombinant HR sequences. HR sequences for use in the invention may alternatively be produced by chemical synthesis by methods known in the art (see below).

[0233] As discussed in more detail later in the specification, Applicants have identified structural similarities between the SARS spike protein and the surface protein of Neisseria meningitidis, NadA (and other similar bacterial adhesion proteins). Another means of facilitating bacterial expression of HR sequences includes the addition of the stalk and/or anchor sequences of a NadA-like protein to the C-terminus of the recombinant HR sequences. Recombinant sequences containing the bacterial anchor sequence may preferably be prepared in outer membrane vesicles (the preparation of which is discussed in more detail later in the application). Recombinant sequences missing the bacterial anchor sequences may be secreted and isolated from the supernatant.

[0234] The invention includes a polypeptide sequence comprising a first sequence and a second sequence, wherein said first sequence comprises a leader sequence for a bacterial membrane protein and wherein said second sequence comprises a HR sequence of a coronavirus. Preferably, said first sequence comprises the leader sequence for a bacterial adhesin protein. More preferably, said bacterial adhesion protein is NadA. Preferably said second sequence comprises HR1, HR2 or both. In one embodiment, the second sequence comprises HR1, HR2 and the intermediate domain sequence present in the naturally occrding spike protein. For example, the second sequence may comprise a fragment of a coronavirus spike protein comprising the amino acids starting with the N-terminus of the HR1 region and ending with the C-terminus of the HR2 region.

[0235] The invention further includes a polypeptide sequence comprising a first, second, third and fourth sequence, wherein the first sequence comprises a leader sequence for a bacterial membrane protein; wherein said second sequence comprises a HR sequence of a coronavirus; wherein said third sequence comprises a stalk domain of a bacterial adhesion protein; and wherein said fourth sequence comprises an anchor domain of a bacterial adhesion protein. In one embodiment, the first sequence comprising the leader peptide sequence is removed. In another embodiment, the third sequence comprising the stalk domain is removed. In another embodiment, the fourth sequence comprising the anchor domain is removed.

[0236] The polypeptide sequences of the above described constructs may be linked together by means known in the art, including, for example, via glycine linkers.

[0237] Examples of constructs which may be used in such bacterial expression systems are shown in FIG. 50. Polypeptide sequences of each of the constructs illustrated in FIG. 50 are given as SEQ ID NOS: 7200 to 7206.

[0238] 7200 Leader NadA (1-29)—HR1 (879-980)—6× gly—HR2 (1144-1195)—stalk+anchor NadA (88-405)

[0239] 7201 Leader NadA (1-29)—HR1 (879-980)—6× gly—HR2 (1144-1196)—stalk NadA (88-351)

[0240] 7202 Leader NadA (1-29)—HR1—HR2 (879-1196)—stalk+anchor NadA (88-405)

[0241] 7203 Leader NadA (1-29)—HR1—HR2 (879-1196)—stalk NadA (88-351)

[0242] 7204 HR1—HR2 (879-1196)—stalk NadA (88-351)-6× his

[0243] 7205 Leader NadA (1-29)—HR1—HR2 (879-1196)-anchor NadA (351-405)

[0244] 7206 Leader NadA (1-29)—HR1—HR2 (879-1196)

[0245] Administration of one of more of these Membrane Fusion sequences may also interfere with the ability of a coronavirus to fuse to a host cell membrane. Accordingly, the invention includes an isolated polypeptide comprising an amino acid sequence selected from the group consisting of SEQ ID NO: 7197, SEQ ID NO: 7198 and SEQ ID NO: 7199. The invention further includes an isolated polypeptide comprising an amino acid sequence having sequence homology to an amino acid sequence selected from the group consisting of SEQ ID NO: 7197, SEQ ID NO: 7198 and SEQ ID NO: 7199.

[0246] Two or more of these SARS Membrane Fusion peptides can be combined together. The invention includes a composition comprising two SARS Membrane Fusion peptides wherein said peptides are selected from at least two of the amino acids selected from the group consisting of SEQ ID NO: 7197, SEQ ID NO: 7198 and SEQ ID NO: 7199, or a sequence having sequence identity thereto.

[0247] Two or more of the SARS Membrane Fusion peptides may be linked together. Accordingly, the invention includes a polypeptide comprising a first amino acid sequence and a second amino acid sequence, wherein said first and second amino acid sequences are selected from the group consisting of SEQ ID NO: 7197, SEQ ID NO: 7198 and SEQ ID NO: 7199, or a sequence having sequence identity thereto. Preferably, said first amino acid sequence and said second amino acid sequence are different SARS Membrane Fusion peptides, i.e., they are not the same.

[0248] The invention also includes a method of treating or preventing SARS virus infection comprising administering one or more of the SARS Membrane Fusion peptide compositions described above.

[0249] As discussed above, the spike protein is capable of forming trimers. The invention further includes a polypeptide comprising SEQ ID NO: 6042 in trimeric form. The invention includes a composition comprising at least polypeptides wherein each polypeptide comprises at least the alpha-helical coiled region of a SARS virus spike protein. Preferably, the spike protein comprises SEQ ID NO: 6042 or a fragment thereof.

[0250] The invention further includes a composition comprising a SARS virus spike protein or a fragment thereof wherein said protein is associated with a transmembrane and wherein said fragment comprises the alpha-helical region of the SARS virus spike protein. Preferably, the composition comprises at least three SARS virus spike proteins or a fragment thereof, wherein the fragment comprises the alpha-helical region of the SARS virus spike protein.

[0251] The invention further includes an antibody which specifically binds to a trimeric form of SARS virus spike proteins. Preferably, the spike protein comprises SEQ ID NO: 6042 or a fragment thereof. The invention includes an antibody which specifically binds to a trimeric form of SARS virus spike proteins wherein said proteins are associated with a transmembrane.

[0252] The invention further includes an antibody which specifically binds to a monomeric form of SARS virus spike protein or a fragment thereof. Preferably, the antibody specifically binds to a monomeric form of SEQ ID NO: 6042 or a fragment thereof.

[0253] The invention further includes a small molecule which interferes with or disrupts the coiling of a SARS viral spike protein trimer.

[0254] The invention further includes an attenuated SARS virus for use as a vaccine wherein said attenuated virus contains a polynucleotide insertion, deletion or substitution which does not disrupt the trimeric conformation of the SARS virus spike protein. The invention further includes an attenuated SARS virus for use as a vaccine wherein said attenuated virus contains a polynucleotide insertion, deletion or substitution which does not disrupt the alpha-helical formation of the SARS virus spike protein.

[0255] The spike protein may be recombinantly produced. In one embodiment, the spike protein is expressed in virus like particles so that the protein is attached to a cell membrane. Such attachment may facilitate presentation of immunogenic epitopes of the spike protein. Preferably, the alpha-helical portion of the spike protein is associated with the cell membrane. Preferably, the spike proteins form a trimer within the transmembrane region of attachment.

[0256] Predicted N-glycosylation sites of SEQ ID NO: 6042 are identified below:

| | | | | Jury | NGlyc |
|---|---|---|---|---|---|
| Position | | | Potential | agreement | result |
| 29 | NYTQ | SEQ ID NO: 7207 | 0.7751 | (9/9) | +++ |
| 65 | NVTG | SEQ ID NO: 7208 | 0.8090 | (9/9) | +++ |
| 109 | NKSQ | SEQ ID NO: 7209 | 0.6081 | (7/9) | + |
| 119 | NSTN | SEQ ID NO: 7210 | 0.7039 | (9/9) | ++ |
| 158 | NCTF | SEQ ID NO: 7211 | 0.5808 | (7/9) | + |
| 227 | NITN | SEQ ID NO: 7212 | 0.7518 | (9/9) | +++ |
| 269 | NGTI | SEQ ID NO: 7213 | 0.6910 | (9/9) | ++ |
| 318 | NITN | SEQ ID NO: 7214 | 0.6414 | (9/9) | ++ |
| 330 | NATK | SEQ ID NO: 7215 | 0.6063 | (8/9) | + |
| 357 | NSTF | SEQ ID NO: 7216 | 0.5746 | (8/9) | + |
| 589 | NASS | SEQ ID NO: 7217 | 0.5778 | (6/9) | + |
| 602 | NCTD | SEQ ID NO: 7218 | 0.6882 | (9/9) | ++ |
| 699 | NFSI | SEQ ID NO: 7219 | 0.5357 | (7/9) | + |
| 783 | NFSQ | SEQ ID NO: 7220 | 0.6348 | (9/9) | ++ |
| 1080 | NGTS | SEQ ID NO: 7221 | 0.5806 | (7/9) | + |
| 1116 | NNTV | SEQ ID NO: 7222 | 0.5106 | (5/9) | + |
| 1176 | NESL | SEQ ID NO: 7223 | 0.6796 | (9/9) | ++ |

[0257] Accordingly, the invention includes a polypeptide comprising a fragment of SEQ ID NO: 6042 wherein said fragment comprises one or more of the glycosylation sites identified above (SEQ ID NOS: 7207-7223). The invention further includes a polynucleotide encoding one or more of the fragments identified above. This glycosylation site can be covalently attached to a saccharide. Accordingly, the invention includes a polypeptide comprising a fragment of SEQ ID NO: 6042 wherein said fragment comprises one or more of the glycosylation sites identified above and wherein said polypeptide is glycosylated at one or more of the sites identified above.

[0258] Predicted O-glycosylation sites are identified below:

| Residue No. | | Potential | Threshold | Assignment |
|---|---|---|---|---|
| Thr | 698 | 0.8922 | 0.7696 | T |
| Thr | 706 | 0.9598 | 0.7870 | T |
| Thr | 922 | 0.9141 | 0.7338 | T |
| Ser | 36 | 0.8906 | 0.7264 | S |
| Ser | 703 | 0.8412 | 0.7676 | S |

[0259] The invention includes a polypeptide comprising a fragment of SEQ ID NO: 6042 wherein said fragment comprises one or more of the O-glycosylation sites identified above. The invention further includes a polynucleotide encoding one or more of the fragments identified above. The invention further includes a polypeptide comprising a fragment of SEQ ID NO: 6042 wherein said fragment comprises one or more of the O-glycosylation sites identified above and further wherein the polypeptide is covalently bonded to a saccharide at one or more of the included glycosylation sites.

[0260] The invention further includes a polypeptide comprising a fragment of SEQ ID NO: 6042 wherein said fragment comprises one or more of the N-glycosylation sites identified above and further wherein said fragment comprises one or more of the O-glycosylation sites identified above.

[0261] The invention includes a polypeptide comprising a fragment of SEQ ID NO: 6042 wherein said fragment does not include one or more of the glycosylation sites identified above. The invention also includes a polynucleotide encoding such a polypeptide.

[0262] Predicted phosphorylation sites of SEQ ID NO: 6042 are Ser-346, Tyr-195, and Tyr-723. Accordingly, the invention comprises a polypeptide comprising a fragment of SEQ ID NO: 6042 wherein said fragment comprises at least ten amino acid residues and wherein said fragment comprises one or more of the amino acids selected from the group consisting of Ser-346, Tyr-195, and Tyr-723. In one embodiment, one or more of the amino acids selected from the group consisting of Ser-346, Tyr-195, and Tyr-723 are phosphorylated.

[0263] Expression and functional characterization of the spike glycoprotein has been described by Xiao et al. (2003) Biochem Biophys Res Comm 312:1159-1164.

[0264] T-epitopes for SEQ ID NO: 6042 are identified in Table 16. The invention includes a polypeptide for use as an antigen, wherein the polypeptide comprises: (a) an amino acid sequence selected from the group consisting of the T-epitope sequences identified as SEQ ID NOS: 8041-8280; (b) an amino acid sequence having sequence identity to an amino acid sequence of (a). The invention further comprising a polynucleotide sequence encoding the polypeptides of (a) or (b). The invention further comprising a method of expression or delivery of such polynucleotides through viral vectors and/or viral particles. The invention further comprises a polypeptide comprising two or more of the T-epitope sequences identified in SEQ ID NOS: 8041-8280, or a polynucleotide encoding such a polypeptide.

[0265] The use as an antigen is preferably a use: (1) as a T-cell antigen; (2) for generating a complex between a class I MHC protein (e.g. a class I HLA) and a fragment of said antigen; (3) as an antigen for raising a cell-mediated immune response; and/or (4) as an antigen for raising a CTL response. The use preferably protects or treats disease and/or infection caused by a SARS virus. The invention provides the use of a polypeptide in the manufacture of a medicament for immunising a mammal (typically a human) against SARS viral infection wherein the polypeptide is as defined above.

[0266] The invention provides a method of raising an immune response in a mammal (typically a human), comprising the step of administering to the mammal a polypeptide as defined above, wherein said immune response is a cell-mediated immune response and, preferably, a CTL response. The immune response is preferably protective or therapeutic.

[0267] The invention includes a polypeptide comprising SEQ ID NO: 6040. The invention includes a polypeptide comprising an amino acid sequence having sequence identity to SEQ ID NO: 6040. The invention includes a fragment of a polypeptide comprising SEQ ID NO: 6040. The invention includes a polynucleotide encoding SEQ ID NO: 6040 or a fragment thereof. The invention includes a diagnostic kit comprising a polypeptide comprising SEQ ID NO: 6040 or a fragment thereof. The invention includes a diagnostic kit comprising a polynucleotide sequence encoding SEQ ID NO: 6040 or a fragment thereof. The invention includes an antibody which recognizes a polypeptide comprising SEQ ID NO: 6040 or a fragment thereof.

[0268] SEQ ID NO: 6040 demonstrates functional homology with a membrane protein of coronaviruses. Predicted transmembrane helices of SEQ ID NO: 6040 are identified below:

Predicted Transmembrane Helices

[0269] The sequence positions in brackets denominate the core region.

[0270] Only scores above 500 are considered significant.

| | | | |
|---|---|---|---|
| from | to | score | center |

Inside to outside helices: 3 found

| | | | |
|---|---|---|---|
| 27 (30) | 48 (45) | 1138 | 38 |
| 137 (139) | 153 (153) | 486 | 146 |

Outside to inside helices: 3 found

| | | | |
|---|---|---|---|
| 28 (31) | 45 (45) | 819 | 38 |
| 71 (73) | 90 (90) | 210 | 81 |
| 136 (142) | 156 (156) | 272 | 149 |

[0271] The amino acid region with the highest predicted transmembrane helical region is from amino acid position 27 to 48 of SEQ ID NO: 6040. Such transmembrane regions are often difficult to express recombinantly. Accordingly, the invention includes a polypeptide comprising a fragment of SEQ ID NO: 6040 wherein said fragment does not include the amino acid sequence between positions 27 to 48. The invention includes a polypeptide comprising a fragment of SEQ ID NO: 6040 wherein said fragment does not include the amino acid sequence between positions 28 to 45. The invention also includes a polynucleotide sequence encoding any of the above-identified polypeptides.

[0272] SEQ ID NO: 6040 is predicted to be a hypothetical protein of the SARS virus. A prediction of the protein localization of SEQ ID NO: 6040 is set forth below. SEQ ID NO: 6040 is predicted to be located in one of the following locations: mitochondrial matrix space, microbody (peroxisome), nucleus, and mitochondrial inner membrane. SEQ ID NO: 6040 is predicted to be associated with an organelle inside an infected cell.

[0273] Accordingly, SEQ ID NO: 6040 is a target for screening of chemical inhibitors to the SARS virus. The invention includes a polypeptide comprises SEQ ID NO: 6040 or a fragment thereof. The invention includes a polynucleotide encoding the polypeptide sequence of SEQ ID NO: 6040 or a fragment thereof. The invention includes a method of screening SEQ ID NO: 6040 for an inhibitor. The invention includes the recombinant expression of SEQ ID NO: 6040 in a host cell. The invention includes a small molecule which prevents the polypeptide of SEQ ID NO: 6040 from associating with an organelle inside of an infected cell. The invention includes a fusion protein wherein said fusion protein comprises SEQ ID NO: 6040.

```
PSORT --- Prediction of Protein Localization Sites
                                    version 6.4(WWW)
SEQ ID NO: 6040  163 Residues
Species classification: 4
*** Reasoning Step: 1
Preliminary Calculation of ALOM (threshold: 0.5)
        count: 0
McG: Examining signal sequence (McGeoch)
        Length of UR:  9
        Peak Value of UR:  1.75
        Net Charge of CR: 1
        Discriminant Score:  −2.56
GvH: Examining signal sequence (von Heijne)
        Signal Score (−3.5): 1.94
        Possible cleavage site: 53
>>> Seems to have no N-terminal signal seq.
Amino Acid Composition of Predicted Mature Form:
      calculated from 1
ALOM new cnt: 0 ** thrshld changed to −2
Cleavable signal was detected in ALOM?: 0B
ALOM: finding transmembrane regions (Klein et al.)
        count: 0  value: 1.32  threshold: −2.0
        PERIPHERAL  Likelihood = 1.32
        modified ALOM score:  −1.16
Gavel: Examining the boundary of mitochondrial targeting seq.
          motif at: 156
        HRSVTI
Discrimination of mitochondrial target seq.:
        notclr (0.88)
Rule: mitochondrial protein
Rule: mitochondrial protein
Rule: mitochondrial protein
Rule: mitochondrial protein
*** Reasoning Step: 2
KDEL  Count: 0
Checking apolar signal for intramitochondrial sorting
    (Gavel position 156)  from: 27  to: 44  Score: 5.0
Mitochondrial matrix? Score: 0.36
SKL motif (signal for peroxisomal protein):
        pos: 99(163), count: 1 SKL
        SKL score (peroxisome): 0.3
Amino Acid Composition Tendency for Peroxisome: −4.28
Peroxisomal proteins? Status: notclr
Amino Acid Composition tendency for lysosomal proteins
        score: 0.02 Status: notclr
Modified score for lysosome: 0.152
Checking the amount of Basic Residues (nucleus)
Checking the 4 residue pattern for Nuclear Targeting
        Found: pos: 132 (5) KRKR
Checking the 7 residue pattern for Nuclear Targeting
Checking the Robbins & Dingwall consensus (nucleus)
Checking the RNA binding motif (nucleus or cytoplasm)
nuc modified. Score: 0.60
Nuclear Signal Status: notclr (0.30)
Checking CaaX motif..
Checking N-myristoylation..
Checking CaaX motif..
----- Final Results -----
mitochondrial matrix space --- Certainty = 0.480(Affirmative) <succ>
microbody (peroxisome) --- Certainty = 0.300(Affirmative) <succ>
nucleus --- Certainty = 0.300(Affirmative) <succ>
mitochondrial inner membrane --- Certainty = 0.188(Affirmative) <succ>
```

[0274] Predicted N-glycosylation sites of SEQ ID NO: 6040 are identified below.

| | | | | Jury | NGlyc |
|---|---|---|---|---|---|
| Position | | | Potential | agreement | result |
| 2 | NKTG | (SEQ ID NO: 7255) | 0.7804 | (9/9) | +++ |
| 106 | NLTL | (SEQ ID NO: 7256) | 0.6123 | (7/9) | + |

[0275] Accordingly, the invention comprises a fragment of SEQ ID NO: 6040 wherein said fragment is at least ten amino acids and wherein said fragment comprises one or more of the asparagines from the amino acid positions of SEQ ID NO: 6040 selected from the group consisting of 2 and 106. The invention includes a fragment of SEQ ID NO: 6040 wherein said fragment comprises one or more amino acid sequences selected from the group consisting of SEQ ID NO: 7255 and SEQ ID NO: 7256. Preferably, the fragment comprises the amino acid sequence NKTG (SEQ ID NO: 7255).

[0276] The invention includes a polypeptide comprising a fragment of SEQ ID NO: 6040 wherein said fragment does not include one or more of the glycosylation sites identified above. The invention also includes a polynucleotide encoding such a polypeptide.

[0277] T-epitopes for SEQ ID NO: 6040 are identified in Table 14. The invention includes a polypeptide for use as an antigen, wherein the polypeptide comprises: (a) an amino acid sequence selected from the group consisting of the T-epitope sequences identified in SEQ ID NOS: 7640-7800; (b) an amino acid sequence having sequence identity to an amino acid sequence of (a). The invention further comprising a polynucleotide sequence encoding the polypeptides of (a) or (b). The invention further comprising a method of expression or delivery of such polynucleotides through viral vectors and/or viral particles. The invention further comprises a polypeptide comprising two or more of the T-epitope sequences identified in SEQ ID NOS: 7640-7800, or a polynucleotide encoding such a polypeptide.

[0278] The use as an antigen is preferably a use: (1) as a T-cell antigen; (2) for generating a complex between a class I MHC protein (e.g. a class I HLA) and a fragment of said antigen; (3) as an antigen for raising a cell-mediated immune response; and/or (4) as an antigen for raising a CTL response. The use preferably protects or treats disease and/or infection caused by a SARS virus.

[0279] The invention provides the use of a polypeptide in the manufacture of a medicament for immunising a mammal (typically a human) against SARS viral infection wherein the polypeptide is as defined above.

[0280] The invention provides a method of raising an immune response in a mammal (typically a human), comprising the step of administering to the mammal a polypeptide as defined above, wherein said immune response is a cell-mediated immune response and, preferably, a CTL response. The immune response is preferably protective or therapeutic.

[0281] The invention includes a polypeptide comprising SEQ ID NO: 6041. SEQ ID NO: 6041 demonstrates functional homology with a portion of an ORF 1ab polyprotein. The invention includes a polypeptide comprising an amino acid sequence having sequence identity to SEQ ID NO: 6041. The invention includes a fragment of a polypeptide comprising SEQ ID NO: 6041. The invention includes a polynucleotide sequence encoding an amino acid sequence having sequence identity to SEQ ID NO: 6041. The invention includes a polynucleotide encoding a fragment of a polypeptide comprising SEQ ID NO: 6041.

[0282] The invention includes a diagnostic kit comprising a polypeptide comprising SEQ ID NO: 6041 or a fragment therof. The invention includes a diagnostic kit comprising a polynucleotide encoding SEQ ID NO: 6041 or a fragment thereof. The invention includes an immunogenic composition comprising a polypeptide comprising SEQ ID NO: 6041 or a fragment thereof. The invention includes an antibody which recognizes a polypeptide comprising SEQ ID NO: 6041 or a fragment thereof.

[0283] The polyproteins of coronaviruses are associated with enzymatic activity. Accordingly, SEQ ID NO: 6041 is a target for screening of chemical inhibitors to the SARS virus. The invention includes a polypeptide comprising SEQ ID NO: 6041 or a fragment thereof. The invention includes a polynucleotide encoding the polypeptide sequence of SEQ ID NO: 6041 or a fragment thereof. The invention includes a method of screening SEQ ID NO: 6041 for an inhibitor. The invention includes the recombinant expression of SEQ ID NO: 6041 in a host cell. The invention includes a small molecule which prevents the polypeptide of SEQ ID NO: 6041 from performing enzymative activity. The invention includes a fusion protein wherein said fusion protein comprises SEQ ID NO: 6041.

[0284] Predicted transmembrane or hydrophobic regions of SEQ ID NO: 6041 are identified below. Although the polyprotein of coronaviruses is proteolytically cleaved into numerous smaller proteins, hydrophobic domains in the polyprotein are known to mediate the membrane association of the replication complex and to be able to dramatically alter the architecture of host cell membranes. Accordingly, the hydrophobic domains of the polyprotein are targets for genetic mutation to develop attenuated SARS virus vaccines. The hydrophobic domains are also targets for small molecule inhibitors of the SARS virus. The hydrophobic domains may also be used to generate antibodies specific to those regions to treat or prevent SARS virus infection.

Possible Transmembrane Helices of SEQ ID NO: 6041

[0285] The sequence positions in brackets denominate the core region.

[0286] Only scores above 500 are considered significant.

| | | | |
|---|---|---|---|
| from | to | score | center |

Inside to outside helices: 18 found

| | | | |
|---|---|---|---|
| 234 (234) | 254 (250) | 1046 | 241 |
| 256 (256) | 272 (270) | 252 | 263 |
| 319 (319) | 334 (334) | 227 | 327 |
| 503 (505) | 522 (519) | 405 | 512 |
| 613 (615) | 633 (629) | 619 | 622 |
| 677 (679) | 703 (696) | 467 | 689 |
| 849 (851) | 869 (865) | 229 | 858 |
| 1080 (1080) | 1097 (1094) | 306 | 1087 |
| 1147 (1149) | 1163 (1163) | 354 | 1156 |
| 1557 (1557) | 1581 (1577) | 817 | 1567 |
| 1954 (1954) | 1971 (1971) | 832 | 1964 |
| 2369 (2372) | 2395 (2387) | 300 | 2379 |
| 2513 (2513) | 2532 (2529) | 690 | 2522 |

Outside to inside helices: 14 found

| | | | |
|---|---|---|---|
| 239 (239) | 254 (254) | 924 | 247 |
| 239 (248) | 272 (263) | 468 | 256 |
| 311 (314) | 334 (328) | 267 | 321 |
| 499 (503) | 522 (519) | 485 | 512 |
| 617 (617) | 634 (631) | 425 | 624 |
| 849 (853) | 872 (872) | 572 | 864 |
| 1147 (1147) | 1162 (1162) | 765 | 1155 |
| 1564 (1564) | 1581 (1579) | 883 | 1572 |
| 1951 (1951) | 1968 (1966) | 657 | 1958 |
| 2513 (2522) | 2539 (2537) | 711 | 2529 |

[0287] Accordingly, the invention includes a polypeptide comprising a fragment of SEQ ID NO: 6041, wherein said fragment comprises an amino acid sequence including one or more of the hydrophobic transmembrane sequences identified above. The invention includes a polypeptide comprising a fragment of SEQ ID NO: 6041 wherein said fragment comprises one or more of the following polypeptide sequences of SEQ ID NO: 6041: 234-254, 613-633, 1557-1581, 1954-1971, 2513-2532, 239-254, 1564-1581, 1951-1968, 2513-2539. Preferably, the fragment comprises one or more of the following polypeptide sequences of SEQ ID NO: 6041: 234-254 and 239-254. The invention also includes polynucleotides encoding each of the polypeptide fragments identified above.

[0288] The invention includes an attenuated SARS virus wherein said attenuated SARS virus contains an addition, deletion or substitution in the polynucleotides encoding for one of the hydrophobic domains identified above. The invention also includes a method for creating an attenuated SARS virus comprising mutating a SARS virus by adding, deleting or substituting the viral genome of the SARS virus to alter the coding of one or more of the hydrophobic domains of SEQ ID NO: 6041 identified above.

[0289] The invention includes an antibody which specifically identifies one or more of the hydrophobic regions of SEQ ID NO: 6041 identified above. The invention includes a small molecule which binds to, interferes with the hydrophobicity of or otherwise disrupts one or more of the hydrophobic regions of SEQ ID NO: 6041 identified above.

[0290] Predicted N-glycosylation sites of SEQ ID NO: 6041 are identified below:

| | | | | Jury | NGlyc |
|---|---|---|---|---|---|
| Position | | | Potential | agreement | result |
| 571 | NLSH | (SEQ ID NO: 7257) | 0.6598 | (8/9) | + |
| 835 | NTSR | (SEQ ID NO: 7258) | 0.5762 | (7/9) | + |
| 958 | NVTD | (SEQ ID NO: 7259) | 0.7494 | (9/9) | ++ |
| 1113 | NISD | (SEQ ID NO: 7260) | 0.7259 | (8/9) | + |
| 1205 | NSTL | (SEQ ID NO: 7261) | 0.6296 | (9/9) | ++ |
| 1460 | NVTG | (SEQ ID NO: 7262) | 0.6844 | (9/9) | ++ |
| 1685 | NHSV | (SEQ ID NO: 7263) | 0.5181 | (5/9) | + |
| 2029 | NKTT | (SEQ ID NO: 7264) | 0.5423 | (5/9) | + |

[0291] Accordingly, the invention comprises a polypeptide comprising a fragment of the amino acid sequence of SEQ ID NO: 6041, wherein said fragment comprises one or more of the N-glycosylation sites identified above. The invention comprises a polypeptide comprising a fragment of SEQ ID NO: 6041 wherein said fragment comprises one or more of sequences SEQ ID NOS: 7257-7264. Preferably, the fragment comprises one or more of the sequences SEQ ID NOS: 7257, 7259, 7260, 7261 and 7262. The invention further comprises a polynucleotide encoding one or more of the polypeptides identified above.

[0292] The invention includes a polypeptide comprising a fragment of SEQ ID NO: 6041 wherein said fragment does not include one or more of the glycosylation sites identified above. The invention also includes a polynucleotide encoding such a polypeptide.

[0293] T-epitopes for SEQ ID NO: 6041 are identified in Table 15. The invention includes a polypeptide for use as an antigen, wherein the polypeptide comprises: (a) an amino acid sequence selected from the group consisting of the T-epitope sequences identified in SEQ ID NOS: 7801-8040; (b) an amino acid sequence having sequence identity to an amino acid sequence of (a). The invention further comprising a polynucleotide sequence encoding the polypeptides of (a) or (b). The invention further comprising a method of expression or delivery of such polynucleotides through viral vectors and/or viral particles. The invention further comprises a polypeptide comprising two or more of the T-epitope sequences identified in SEQ ID NOS: 7801-8040, or a polynucleotide encoding such a polypeptide.

[0294] The use as an antigen is preferably a use: (1) as a T-cell antigen; (2) for generating a complex between a class I MHC protein (e.g. a class I HLA) and a fragment of said antigen; (3) as an antigen for raising a cell-mediated immune response; and/or (4) as an antigen for raising a CTL response. The use preferably protects or treats disease and/or infection caused by a SARS virus.

[0295] The invention provides the use of a polypeptide in the manufacture of a medicament for immunising a mammal (typically a human) against SARS viral infection wherein the polypeptide is as defined above.

[0296] The invention provides a method of raising an immune response in a mammal (typically a human), comprising the step of administering to the mammal a polypeptide as defined above, wherein said immune response is a cell-mediated immune response and, preferably, a CTL response. The immune response is preferably protective or therapeutic.

[0297] The invention includes a polypeptide sequence SEQ ID NO: 6043 or a fragment thereof. The invention includes a polypeptide comprising an amino acid sequence having sequence identity to SEQ ID NO: 6043. The invention includes a polynucleotide sequence encoding the amino acid sequence of SEQ ID NO: 6043 or a fragment thereof.

[0298] Predicted transmembrane regions of SEQ ID NO: 6043 are set forth below.

| | | | |
|---|---|---|---|
| from | to | score | center |

Inside to outside helices: 4 found

| | | | |
|---|---|---|---|
| 41 (41) | 56 (56) | 1789 | 49 |
| 76 (79) | 99 (99) | 2142 | 89 |
| 105 (105) | 125 (125) | 1250 | 115 |

Outside to inside helices: 3 found

| | | | |
|---|---|---|---|
| 41 (41) | 59 (56) | 2053 | 49 |
| 76 (82) | 98 (96) | 1580 | 89 |
| 103 (105) | 125 (123) | 1257 | 115 |

[0299] The amino acid region with the highest predicted transmembrane helical region is from amino acid position 76 to 99 of SEQ ID NO: 6043. Such transmembrane regions are often difficult to express recombinantly. Accordingly, the invention includes a polypeptide comprising a fragment of SEQ ID NO: 6043 wherein said fragment does not include one or more of the hydrophobic amino acid sequences identified above. Preferably, the fragment does not include the amino acids between positions 27 to 48. The invention also includes a polynucleotide sequence encoding any of the above-identified polypeptides.

[0300] SEQ ID NO: 6043 is predicted to be a hypothetical protein of the SARS virus. A prediction of the protein localization of SEQ ID NO: 6043 is set forth below. SEQ ID NO: 6043 is predicted to be located in one of the following locations: mitochondrial inner membrane, plasma membrane, Golgi body, and mitochondrial intermembrane space. SEQ ID NO: 6043 may be associated with an organelle inside an infected cell.

[0301] Accordingly, SEQ ID NO: 6043 is a target for screening of chemical inhibitors to the SARS virus. The invention includes a polypeptide comprises SEQ ID NO: 6043 or a fragment thereof. The invention includes a polynucleotide encoding the polypeptide sequence of SEQ ID NO: 6043 or a fragment thereof. The invention includes a method of screening SEQ ID NO: 6043 for an inhibitor. The invention includes the recombinant expression of SEQ ID NO: 6043 in a host cell. The invention includes a small molecule which prevents the polypeptide of SEQ ID NO: 6043 from associating with an organelle inside of an infected cell. The invention includes a fusion protein wherein said fusion protein comprises SEQ ID NO: 6043.

```
PSORT --- Prediction of Protein Localization Sites for SEQ ID NO: 6043
                                        version 6.4(WWW)
Species classification: 4
*** Reasoning Step: 1
Preliminary Calculation of ALOM (threshold: 0.5)
        count: 3
        Position of the most N-terminal TMS: 40 at i = 2
MTOP: membrane topology (Hartmann et al.)
        I(middle): 47  Charge diffirence(C − N): 3.5
McG: Examining signal sequence (McGeoch)
        Length of UR:  12
        Peak Value of UR:  1.41
        Net Charge of CR: 0
        Discriminant Score:  −4.67
GvH: Examining signal sequence (von Heijne)
        Signal Score (−3.5): 3.44
        Possible cleavage site: 15
>>> Seems to have no N-terminal signal seq.
Amino Acid Composition of Predicted Mature Form:
      calculated from 1
ALOM new cnt: 2 ** thrshld changed to −2
Cleavable signal was detected in ALOM?: 0B
ALOM: finding transmembrane regions (Klein et al.)
        count: 2  value: −6.90  threshold: −2.0
```

| | |
|---|---|
| INTEGRAL | Likelihood = −6.90 Transmembrane 83-99 (78-101) |
| INTEGRAL | Likelihood = −5.04 Transmembrane 40-56 (37-60) |
| PERIPHERAL | Likelihood = −0.32 |

```
        modified ALOM score:  1.48
>>> Likely a Type IIIb membrane protein (Nexo Ccyt)
Gavel: Examining the boundary of mitochondrial targeting seq.
          motif at: 128
        MRCWLC
Discrimination of mitochondrial target seq.:
        notclr (0.76)
Rule: mitochondrial protein
Rule: mitochondrial protein
Rule: mitochondrial protein
Rule: mitochondrial protein
*** Reasoning Step: 2
Type IIIa or IIIb is favored for ER memb. proteins
KDEL  Count: 0
Checking apolar signal for intramitochondrial sorting
    (Gavel position 128)  from: 39  to: 56  Score: 11.5
>>> Seems to have an intramitochondrial signal
Mitochondrial inner membrane? Score: 0.59
Mitochondrial intermemb.space? Score: 0.22
SKL motif (signal for peroxisomal protein):
        pos: 92(274), count: 1 SHL
        SKL score (peroxisome):  0.3
Amino Acid Composition Tendency for Peroxisome:  4.78
Peroxisomal proteins? Status: positive
Amino Acid Composition tendency for lysosomal proteins
        score: 1.16 Status: notclr
Type III proteins may be localized at Golgi
Checking the amount of Basic Residues (nucleus)
Checking the 4 residue pattern for Nuclear Targeting
Checking the 7 residue pattern for Nuclear Targeting
Checking the Robbins & Dingwall consensus (nucleus)
Checking the RNA binding motif (nucleus or cytoplasm)
Nuclear Signal  Status: negative (0.00)
Check the Number of TMSs for typeIII (plasma memb.)
Checking N-myristoylation..
----- Final Results -----
mitochondrial inner membrane --- Certainty = 0.664(Affirmative) <succ>
plasma membrane --- Certainty = 0.600(Affirmative) <succ>
Golgi body --- Certainty = 0.400(Affirmative) <succ>
mitochondrial intermembrane space --- Certainty = 0.362(Affirmative) <succ>
```

[0302] Predicted N— and O-glycosylation sites of SEQ ID NO: 6043 are identified below.

| | | Jury | NGlyc |
|---|---|---|---|
| Position | Potential | agreement | result |
| 227 NATF (SEQ ID NO: 7265) | 0.6328 | (7/9) | + |

| Residue No. | | Potential | Threshold | Assignment |
|---|---|---|---|---|
| Thr | 28 | 0.9095 | 0.6280 | T |
| Thr | 32 | 0.8740 | 0.6595 | T |
| Thr | 34 | 0.9058 | 0.6655 | T |
| Thr | 170 | 0.6816 | 0.6600 | T |
| Thr | 267 | 0.9240 | 0.5779 | T |
| Thr | 268 | 0.7313 | 0.5708 | T |
| Thr | 269 | 0.9859 | 0.5583 | T |
| Thr | 270 | 0.8023 | 0.5492 | T |
| Ser | 27 | 0.6930 | 0.6091 | S |
| Ser | 252 | 0.6457 | 0.5977 | S |

[0303] Accordingly, the invention comprises a polypeptide comprising a fragment of the amino acid sequence of SEQ ID NO: 6043, wherein said fragment comprises the N-glycosylation sites or O-glycosylation sites identified above. The invention comprises a polypeptide comprising a fragment of SEQ ID NO: 6043 wherein said fragment comprises one or more of the N-glycosylation sites or O-glycosylation sites identified above. The invention further comprises a polynucleotide encoding one or more of the polypeptides identified above.

[0304] The invention includes a polypeptide comprising a fragment of SEQ ID NO: 6043 wherein said fragment does not include one or more of the glycosylation sites identified above. The invention also includes a polynucleotide encoding such a polypeptide.

[0305] T-epitopes for SEQ ID NO: 6043 are identified in Table 17. The invention includes a polypeptide for use as an antigen, wherein the polypeptide comprises: (a) an amino acid sequence selected from the group consisting of the T-epitope sequences identified in SEQ ID NOS: 8281-8486; (b) an amino acid sequence having sequence identity to an amino acid sequence of (a). The invention further comprising a polynucleotide sequence encoding the polypeptides of (a) or (b). The invention further comprising a method of expression or delivery of such polynucleotides through viral vectors and/or viral particles. The invention further comprises a polypeptide comprising two or more of the T-epitope sequences identified in SEQ ID NOS: 8281-8486, or a polynucleotide encoding such a polypeptide.

[0306] The use as an antigen is preferably a use: (1) as a T-cell antigen; (2) for generating a complex between a class I MHC protein (e.g. a class I HLA) and a fragment of said antigen; (3) as an antigen for raising a cell-mediated immune response; and/or (4) as an antigen for raising a CTL response. The use preferably protects or treats disease and/or infection caused by a SARS virus. The invention provides the use of a polypeptide in the manufacture of a medicament for immunising a mammal (typically a human) against SARS viral infection wherein the polypeptide is as defined above.

[0307] The invention provides a method of raising an immune response in a mammal (typically a human), comprising the step of administering to the mammal a polypeptide as defined above, wherein said immune response is a cell-mediated immune response and, preferably, a CTL response. The immune response is preferably protective or therapeutic.

[0308] The invention includes a polypeptide comprising SEQ ID NO: 6044. The invention includes a polypeptide comprising a fragment of SEQ ID NO: 6044 or a sequence having sequence identity to SEQ ID NO:206. The invention includes a polynucleotide encoding SEQ ID NO: 6044.

[0309] SEQ ID NO: 6044 is identified as a hypothetical protein. Predicted hydrophobic or transmembrane regions of SEQ ID NO: 6044 are identified below:

| | | | |
|---|---|---|---|
| from | to | score | center |

Inside to outside helices: 3 found

| | | | |
|---|---|---|---|
| 1 (1) | 17 (15) | 891 | 8 |
| 47 (47) | 66 (63) | 221 | 56 |

Outside to inside helices: 4 found

| | | | |
|---|---|---|---|
| 1 (4) | 21 (19) | 599 | 11 |

[0310] Accordingly, the invention includes a polypeptide comprising a fragment of SEQ ID NO: 6044 wherein said fragment does not include one or more of the hydrophobic amino acid sequences identified above. Preferably, the fragment does not include the amino acids between positions 1 to 19. The invention also includes a polynucleotide sequence encoding any of the above-identified polypeptides.

[0311] SEQ ID NO: 6044 is predicted to be a hypothetical protein of SARS virus. A prediction of the protein localization of SEQ ID NO: 6044 is set forth below. SEQ ID NO: 6044 is predicted to be located in one of the following locations: nucleus, mitochondrial matrix, lysosome (lumen), and microbody (peroxisome). SEQ ID NO: 6044 may be associated with an organelle inside an infected cell.

[0312] Accordingly, SEQ ID NO: 6044 is a target for screening of chemical inhibitors to the SARS virus. The invention includes a polypeptide comprises SEQ ID NO: 6044 or a fragment thereof The invention includes a polynucleotide encoding the polypeptide sequence of SEQ ID NO: 6044 or a fragment thereof. The invention includes a method of screening SEQ ID NO: 6044 for an inhibitor. The invention includes the recombinant expression of SEQ ID NO: 6044 in a host cell. The invention includes a small molecule which prevents the polypeptide of SEQ ID NO: 6044 from associating with an organelle inside of an infected cell. The invention includes a fusion protein wherein said fusion protein comprises SEQ ID NO: 6044.

```
PSORT --- Prediction of Protein Localization Sites for SEQ ID NO: 6044
                                version 6.4(WWW)
154 Residues
Species classification: 4
*** Reasoning Step: 1
Preliminary Calculation of ALOM (threshold: 0.5)
        count: 0
McG: Examining signal sequence (McGeoch)
        Length of UR:  7
        Peak Value of UR:  1.06
        Net Charge of CR: 1
        Discriminant Score:  −7.97
GvH: Examining signal sequence (von Heijne)
        Signal Score (−3.5): −3.28
        Possible cleavage site: 34
>>> Seems to have no N-terminal signal seq.
Amino Acid Composition of Predicted Mature Form:
      calculated from 1
ALOM new cnt: 0 ** thrshld changed to −2
Cleavable signal was detected in ALOM?: 0B
ALOM: finding transmembrane regions (Klein et al.)
        count: 0  value:  1.43  threshold: −2.0
        PERIPHERAL  Likelihood = 1.43
        modified ALOM score:  −1.19
Gavel: Examining the boundary of mitochondrial targeting seq.
          motif at: 151
        FRKKQV
Discrimination of mitochondrial target seq.:
        notclr (−0.46)
*** Reasoning Step: 2
KDEL  Count: 0
Checking apolar signal for intramitochondrial sorting
    (Gavel position 151)  from: 46  to: 50  Score: 5.0
Mitochondrial matrix? Score: 0.36
SKL motif (signal for peroxisomal protein):
        pos: −1(154), count: 0
Amino Acid Composition Tendency for Peroxisome: 0.61
Peroxisomal proteins? Status: notclr
        AAC score (peroxisome): 0.149
Amino Acid Composition tendency for lysosomal proteins
        score: 0.81 Status: notclr
Modified score for lysosome: 0.231
Checking the amount of Basic Residues (nucleus)
Checking the 4 residue pattern for Nuclear Targeting
        Found: pos: 134 (3) KHKK
Checking the 7 residue pattern for Nuclear Targeting
Checking the Robbins & Dingwall consensus (nucleus)
        Found: pos: 136 (3) KK VSTNLCTHSF RKKQV
Final Robbins Score (nucleus): 0.60
Checking the RNA binding motif (nucleus or cytoplasm)
nuc modified.  Score: 0.90
Nuclear Signal  Status: positive (0.70)
Checking CaaX motif..
Checking N-myristoylation..
Checking CaaX motif..
----- Final Results -----
nucleus --- Certainty = 0.880(Affirmative) <succ>
mitochondrial matrix space --- Certainty = 0.360(Affirmative) <succ>
lysosome (lumen) --- Certainty = 0.231(Affirmative) <succ>
microbody (peroxisome) --- Certainty = 0.149(Affirmative) <succ>
```

[0313] One predicted O-glycosylation site of SEQ ID NO: 6044 is identified at residue 4:

| Residue No. | | Potential | Threshold | Assignment |
|---|---|---|---|---|
| Thr | 4 | 0.6839 | 0.6484 | T |

[0314] Accordingly, the invention comprises a polypeptide comprising a fragment of the amino acid sequence of SEQ ID NO: 6044, wherein said fragment comprises the O-glycosylation site identified above. The invention further comprises a polynucleotide encoding one or more of the polypeptides identified above.

[0315] The invention includes a polypeptide comprising a fragment of SEQ ID NO: 6044 wherein said fragment does not include one or more of the glycosylation sites identified above. The invention also includes a polynucleotide encoding such a polypeptide.

[0316] T-epitopes for SEQ ID NO: 6044 are identified in Table 18. The invention includes a polypeptide for use as an antigen, wherein the polypeptide comprises: (a) an amino acid sequence selected from the group consisting of the T-epitope sequences identified in SEQ ID NOS: 8487-8665; (b) an amino acid sequence having sequence identity to an amino acid sequence of (a). The invention further comprising a polynucleotide sequence encoding the polypeptides of (a) or (b). The invention further comprising a method of expression or delivery of such polynucleotides through viral vectors and/or viral particles. The invention further comprises a polypeptide comprising two or more of the T-epitope sequences identified in SEQ ID NOS: 8487-8665, or a polynucleotide encoding such a polypeptide.

[0317] The use as an antigen is preferably a use: (1) as a T-cell antigen; (2) for generating a complex between a class I MHC protein (e.g. a class I HLA) and a fragment of said antigen; (3) as an antigen for raising a cell-mediated immune response; and/or (4) as an antigen for raising a CTL response. The use preferably protects or treats disease and/or infection caused by a SARS virus. The invention provides the use of a polypeptide in the manufacture of a medicament for immunising a mammal (typically a human) against SARS viral infection wherein the polypeptide is as defined above.

[0318] The invention provides a method of raising an immune response in a mammal (typically a human), comprising the step of administering to the mammal a polypeptide as defined above, wherein said immune response is a cell-mediated immune response and, preferably, a CTL response. The immune response is preferably protective or therapeutic.

[0319] The invention includes a polypeptide sequence comprising SEQ ID NO: 6045. The invention includes a polypeptide sequence comprising an amino acid sequence having sequence identity to SEQ ID NO: 6045. The invention includes a polypeptide sequence comprising a fragment of SEQ ID NO: 6045. The invention includes a polynucleotide sequence encoding any of these polypeptides.

[0320] SEQ ID NO: 6045 demonstrates functional homology with the envelope or small membrane protein of coronaviruses. The invention includes a diagnostic kit comprising a polypeptide comprising SEQ ID NO: 6045 or a fragment thereof. The invention includes a diagnostic kit comprising a polynucleotide encoding SEQ ID NO: 6045 or a fragment thereof. The invention includes an immunogenic composition comprising SEQ ID NO: 6045 or a fragment thereof. The invention includes an antibody which recognizes a polypeptide comprising SEQ ID NO: 6045 or a fragment thereof.

[0321] Predicted transmembrane regions of SEQ ID NO: 6045 are identified below:

| | | | |
|---|---|---|---|
| from | to | score | center |

Inside to outside helices: 1 found

| | | | |
|---|---|---|---|
| 17 (19) | 33 (33) | 2881 | 26 |

Outside to inside helices: 1 found

| | | | |
|---|---|---|---|
| 17 (17) | 34 (34) | 2981 | 27 |

[0322] Accordingly, the invention includes a polypeptide comprising a fragment of SEQ ID NO: 6045 wherein said fragment does not include one or more of the hydrophobic amino acid sequences identified above. Preferably, the fragment does not include the amino acids between positions 17 to 34. The invention also includes a polynucleotide sequence encoding any of the above-identified polypeptides. In one embodiment, the invention includes a polypeptide comprising a fragment of SEQ ID NO: 6045 wherein said fragment does not include amino acid residues 1-34 of SEQ ID NO: 6045.

[0323] Predicted protein Localization Site of SEQ ID NO: 6045 is below.

```
PSORT --- Prediction of Protein Localization Sites for SEQ ID NO: 6045
                                                version 6.4(WWW)
Species classification: 4
*** Reasoning Step: 1
Preliminary Calculation of ALOM (threshold: 0.5)
        count: 2
        Position of the most N-terminal TMS: 17 at i = 1
MTOP: membrane topology (Hartmann et al.)
        I(middle): 24  Charge diffirence(C-N): 2.0
McG: Examining signal sequence (McGeoch)
        Length of UR: 29
        Peak Value of UR: 3.40
        Net Charge of CR: −2
        Discriminant Score: 13.07
GvH: Examining signal sequence (von Heijne)
        Signal Score (−3.5): 4.37
        Possible cleavage site: 32
... positive value of mtop ...
>>> Seems to have an uncleavable N-term signal seq.
Amino Acid Composition of Predicted Mature Form:
      calculated from 1
ALOM new cnt: 1 ** thrshld changed to −2
Cleavable signal was detected in ALOM?: 0B
ALOM: finding transmembrane regions (Klein et al.)
        count: 1  value: −15.12  threshold: −2.0
```

| | |
|---|---|
| INTEGRAL | Likelihood = −15.12 Transmembrane 17-33 (8-44) |
| PERIPHERAL | Likelihood = 0.47 |

```
        modified ALOM score:  3.12
>>> Seems to be a Type Ib (Nexo Ccyt) membrane protein
        The cytoplasmic tail is from 34 to 76 (44 Residues)
Rule: vesicular pathway
Rule: vesicular pathway
Rule: vesicular pathway
(6) or uncleavable?
Gavel: Examining the boundary of mitochondrial targeting seq.
          motif at: 6
        Uncleavable? Ipos set to: 16
Discrimination of mitochondrial target seq.:
        notclr (0.19)
Rule: vesicular pathway
Rule: vesicular pathway
Rule: vesicular pathway
*** Reasoning Step: 2
> Relative position of the end of the tail: 44%
Memb.protein with uncleavable signl is often at ER
KDEL  Count: 0
Checking apolar signal for intramitochondrial sorting
    (Gavel position 16)  from: 70  to: 99  Score: 21.5
>>> Seems to have an intramitochondrial signal
SKL motif (signal for peroxisomal protein):
        pos: −1(76), count: 0
Amino Acid Composition Tendency for Peroxisome: −4.11
Peroxisomal proteins? Status: negative
Amino Acid Composition tendency for lysosomal proteins
        score: 0.68 Status: notclr
Checking the amount of Basic Residues (nucleus)
Checking the 4 residue pattern for Nuclear Targeting
Checking the 7 residue pattern for Nuclear Targeting
Checking the Robbins & Dingwall consensus (nucleus)
Checking the RNA binding motif (nucleus or cytoplasm)
Nuclear Signal  Status: negative (0.00)
Check cytoplasmic tail for typeIb (plasma memb.)
Checking the NPXY motif..
Checking the YXRF motif..
Checking N-myristoylation..
----- Final Results -----
plasma membrane --- Certainty = 0.730(Affirmative) <succ>
endoplasmic reticulum (membrane) --- Certainty = 0.640(Affirmative) <succ>
endoplasmic reticulum (lumen) --- Certainty = 0.100(Affirmative) <succ>
outside --- Certainty = 0.100(Affirmative) <succ>
```

[0324] Predicted N-glycosylation sites of SEQ ID NO: 6045 are identified at residues 48 and 66:

| | | Jury | NGlyc | |
|---|---|---|---|---|
| Position | Potential | agreement | result | |
| 48 NVSL | 0.6514 | (9/9) | ++ | (SEQ ID NO: 7266) |
| 66 NSSE | 0.5880 | (7/9) | + | (SEQ ID NO: 7267) |

[0325] Accordingly, the invention comprises a polypeptide comprising a fragment of the amino acid sequence of SEQ ID NO: 6045, wherein said fragment comprises one or more of the N-glycosylation sites identified above. The invention comprises a polypeptide comprising a fragment of SEQ ID NO: 6045 wherein said fragment comprises one or more of the N-glycosylation sites identified above. The invention further comprises a polynucleotide encoding one or more of the polypeptides identified above.

[0326] The invention includes a polypeptide comprising a fragment of SEQ ID NO: 6045 wherein said fragment does not include one or more of the glycosylation sites identified above. The invention also includes a polynucleotide encoding such a polypeptide.

[0327] T-epitopes for SEQ ID NO: 6045 are identified in Table 19. The invention includes a polypeptide for use as an antigen, wherein the polypeptide comprises: (a) an amino acid sequence selected from the group consisting of the T-epitope sequences identified in SEQ ID NOS: 8666-8820; (b) an amino acid sequence having sequence identity to an amino acid sequence of (a). The invention further comprising a polynucleotide sequence encoding the polypeptides of (a) or (b). The invention further comprising a method of expression or delivery of such polynucleotides through viral vectors and/or viral particles. The invention further comprises a polypeptide comprising two or more of the T-epitope sequences identified in SEQ ID NOS: 8666-8820, or a polynucleotide encoding such a polypeptide.

[0328] The use as an antigen is preferably a use: (1) as a T-cell antigen; (2) for generating a complex between a class I MHC protein (e.g. a class I HLA) and a fragment of said antigen; (3) as an antigen for raising a cell-mediated immune response; and/or (4) as an antigen for raising a CTL response. The use preferably protects or treats disease and/or infection caused by a SARS virus. The invention provides the use of a polypeptide in the manufacture of a medicament for immunising a mammal (typically a human) against SARS viral infection wherein the polypeptide is as defined above.

[0329] The invention provides a method of raising an immune response in a mammal (typically a human), comprising the step of administering to the mammal a polypeptide as defined above, wherein said immune response is a cell-mediated immune response and, preferably, a CTL response. The immune response is preferably protective or therapeutic.

[0330] The invention includes a polypeptide sequence comprising SEQ ID NO: 6046. The invention includes polypeptide sequences comprising an amino acid sequence having sequence identity to SEQ ID NO: 6046. The invention includes a polypeptide sequence comprising a fragment of SEQ ID NO: 6046. The invention includes a polynucleotide encoding one of these polypeptides.

[0331] SEQ ID NO: 6046 has functional homology with a matrix protein of a coronavirus. The invention includes a diagnostic kit comprising a polypeptide comprising SEQ ID NO: 6046 or a fragment thereof. The invention includes a diagnostic kit comprising a polynucleotide encoding SEQ ID NO: 6046 or a fragment thereof. The invention includes an immunogenic composition comprising SEQ ID NO: 6046 or a fragment thereof. The invention includes an antibody which recognizes a polypeptide comprising SEQ ID NO: 6046 or a fragment thereof.

[0332] Predicted transmembrane regions of SEQ ID NO: 6046 are identified below.

| | | | |
|---|---|---|---|
| from | to | score | center |

Inside to outside helices: 3 found

| | | | |
|---|---|---|---|
| 21 (21) | 38 (36) | 2412 | 29 |
| 51 (53) | 69 (69) | 2645 | 60 |
| 74 (82) | 96 (96) | 2464 | 89 |

Outside to inside helices: 3 found

| | | | |
|---|---|---|---|
| 18 (21) | 38 (38) | 2363 | 28 |
| 52 (52) | 67 (67) | 2363 | 60 |
| 76 (76) | 95 (92) | 2605 | 84 |

[0333] Accordingly, the invention includes a polypeptide comprising a fragment of SEQ ID NO: 6046 wherein said fragment does not include one or more of the hydrophobic amino acid sequences identified above. Preferably, the fragment does not include the amino acids between positions selected from the group consisting of 18 to 38, 52 to 67 and 76 to 95. The invention also includes a polynucleotide sequence encoding any of the above-identified polypeptides.

[0334] Predicted protein localization of SEQ ID NO: 6046 is set forth below.

```
PSORT --- Prediction of Protein Localization Sites
                                        version 6.4(WWW)
Species classification: 4
*** Reasoning Step: 1
Preliminary Calculation of ALOM (threshold: 0.5)
        count: 3
        Position of the most N-terminal TMS: 21 at i = 1
MTOP: membrane topology (Hartmann et al.)
        I(middle): 28  Charge diffirence(C − N): 6.0
McG: Examining signal sequence (McGeoch)
        Length of UR:  1
        Peak Value of UR:  3.16
        Net Charge of CR: −3
        Discriminant Score:  2.21
GvH: Examining signal sequence (von Heijne)
        Signal Score (−3.5): 4.29
        Possible cleavage site: 39
... positive value of mtop ...
>>> Seems to have an uncleavable N-term signal seq.
Amino Acid Composition of Predicted Mature Form:
      calculated from 1
Cleavable signal was detected in ALOM?: 0B
ALOM: finding transmembrane regions (Klein et al.)
        count: 3  value:  −7.64  threshold: 0.5
```

| | |
|---|---|
| INTEGRAL | Likelihood = −7.64 Transmembrane 21-37 (18-39) |
| INTEGRAL | Likelihood = −7.59 Transmembrane 50-66 (43-72) |
| INTEGRAL | Likelihood = −5.04 Transmembrane 79-95 (72-99) |
| PERIPHERAL | Likelihood = 2.38 |

```
        modified ALOM score:  2.13
>>> Likely a Type IIIb membrane protein (Nexo Ccyt)
Rule: vesicular pathway
Rule: vesicular pathway
Rule: vesicular pathway
(2) or uncleavable?
Gavel: Examining the boundary of mitochondrial targeting seq.
          motif at: 2
        Uncleavable? Ipos set to: 12
Discrimination of mitochondrial target seq.:
        negative (−4.16)
Rule: vesicular pathway
Rule: vesicular pathway
Rule: vesicular pathway
*** Reasoning Step: 2
Type IIIa or IIIb is favored for ER memb. proteins
Memb.protein with uncleavable signl is often at ER
KDEL  Count: 0
Checking apolar signal for intramitochondrial sorting
SKL motif (signal for peroxisomal protein):
        pos: −1(221), count: 0
Amino Acid Composition Tendency for Peroxisome:  5.01
Peroxisomal proteins? Status: notclr
Amino Acid Composition tendency for lysosomal proteins
        score: 2.30  Status: positive
Type III proteins may be localized at Golgi
Checking the amount of Basic Residues (nucleus)
Checking the 4 residue pattern for Nuclear Targeting
Checking the 7 residue pattern for Nuclear Targeting
Checking the Robbins & Dingwall consensus (nucleus)
Checking the RNA binding motif (nucleus or cytoplasm)
Nuclear Signal  Status: negative (0.00)
Check the Number of TMSs for typeIII (plasma memb.)
Checking N-myristoylation..
----- Final Results -----
endoplasmic reticulum (membrane) --- Certainty = 0.685(Affirmative) <succ>
plasma membrane --- Certainty = 0.640(Affirmative) <succ>
Golgi body --- Certainty = 0.460(Affirmative) <succ>
endoplasmic reticulum (lumen) --- Certainty = 0.100(Affirmative) <succ>
```

[0335] One predicted N-glycosylation sites of SEQ ID NO: 6046 is identified at residue 4:

[0336] Prediction of N-glycosylation Sites

| | | Jury | NGlyc | |
|---|---|---|---|---|
| Position | Potential | agreement | result | |
| 4 NGTI | 0.8430 | (9/9) | +++ | (SEQ ID NO: 7268) |

[0337] Accordingly, the invention comprises a polypeptide comprising a fragment of the amino acid sequence of SEQ ID NO: 6046, wherein said fragment comprises the N-glycosylation site identified above. The invention further comprises a polynucleotide encoding one or more of the polypeptides identified above.

[0338] The invention further comprises a polypeptide comprising a fragment of amino acid sequence SEQ ID NO: 6046, wherein said fragment does not include the N-glycosylation site identified above. The invention includes a polynucleotide encoding such a fragment.

[0339] A variant of SEQ ID NO: 6046 that is included within the invention is SEQ ID NO: 9963. Compared to SEQ ID NO: 6046, this sequence has Val at residue 72 instead of Ala.

[0340] T-epitopes for SEQ ID NO: 6046 are identified in Table 20. The invention includes a polypeptide for use as an antigen, wherein the polypeptide comprises: (a) an amino acid sequence selected from the group consisting of the T-epitope sequences identified in SEQ ID NOS: 8821-9018; (b) an amino acid sequence having sequence identity to an amino acid sequence of (a). The invention further comprising a polynucleotide sequence encoding the polypeptides of (a) or (b). The invention further comprising a method of expression or delivery of such polynucleotides through viral vectors and/or viral particles. The invention further comprises a polypeptide comprising two or more of the T-epitope sequences identified in SEQ ID NOS: 8821-9018, or a polynucleotide encoding such a polypeptide.

[0341] The use as an antigen is preferably a use: (1) as a T-cell antigen; (2) for generating a complex between a class I MHC protein (e.g. a class I HLA) and a fragment of said antigen; (3) as an antigen for raising a cell-mediated immune response; and/or (4) as an antigen for raising a CTL response. The use preferably protects or treats disease and/or infection caused by a SARS virus. The invention provides the use of a polypeptide in the manufacture of a medicament for immunising a mammal (typically a human) against SARS viral infection wherein the polypeptide is as defined above.

[0342] The invention provides a method of raising an immune response in a mammal (typically a human), comprising the step of administering to the mammal a polypeptide as defined above, wherein said immune response is a cell-mediated immune response and, preferably, a CTL response. The immune response is preferably protective or therapeutic.

[0343] The invention includes a polypeptide sequence comprising SEQ ID NO: 6047 or a fragment thereof or an amino acid sequence having sequence identity thereto. Predicted transmembrane regions of SEQ ID NO: 6047 are identified below.

| | | | |
|---|---|---|---|
| from | to | score | center |

Inside to outside helices: 2 found

| | | | |
|---|---|---|---|
| 7 (10) | 29 (27) | 729 | 17 |
| 21 (24) | 41 (41) | 640 | 34 |

Outside to inside helices: 2 found

| | | | |
|---|---|---|---|
| 4 (4) | 22 (19) | 874 | 12 |
| 22 (24) | 41 (41) | 499 | 31 |

[0344] Accordingly, the invention includes a polypeptide comprising a fragment of SEQ ID NO: 6047 wherein said fragment does not include one or more of the hydrophobic amino acid sequences identified above. Preferably, the fragment does not include the amino acids between positions selected from the group consisting of 4 to 22 and 22 to 41. The invention also includes a polynucleotide sequence encoding any of the above-identified polypeptides.

[0345] SEQ ID NO: 6047 is predicted to be a hypothetical protein of SARS virus. A prediction of the protein localization of SEQ ID NO: 6047 is set forth below. SEQ ID NO: 6047 is predicted to be located in one of the following locations: plasma membrane, endoplasmic reticulum, Golgi body, and microbody (peroxisome). SEQ ID NO: 6047 may be associated with an organelle inside an infected cell or with viral entry to a host cell.

[0346] Accordingly, SEQ ID NO: 6047 is a target for screening of chemical inhibitors to the SARS virus. The invention includes a polypeptide comprises SEQ ID NO: 6047 or a fragment thereof. The invention includes a polynucleotide encoding the polypeptide sequence of SEQ ID NO: 6047 or a fragment thereof. The invention includes a method of screening SEQ ID NO: 6047 for an inhibitor. The invention includes the recombinant expression of SEQ ID NO: 6047 in a host cell. The invention includes a small molecule which prevents the polypeptide of SEQ ID NO: 6047 from associating with an organelle inside of an infected cell or interacting with a host cell membrane. The invention includes a fusion protein wherein said fusion protein comprises SEQ ID NO: 6047. Predicted protein localization of SEQ ID NO: 6047 is set forth below.

```
PSORT --- Prediction of Protein Localization Sites
                                        version 6.4(WWW)
Species classification: 4
*** Reasoning Step: 1
Preliminary Calculation of ALOM (threshold: 0.5)
        count: 1
        Position of the most N-terminal TMS: 2 at i = 1
MTOP: membrane topology (Hartmann et al.)
        I(middle): 9  Charge diffirence(C − N): 0.5
McG: Examining signal sequence (McGeoch)
        Length of UR:  6
        Peak Value of UR:  3.08
        Net Charge of CR: 0
        Discriminant Score:  5.12
GvH: Examining signal sequence (von Heijne)
        Signal Score (−3.5): −4.45
        Possible cleavage site: 34
>>> Seems to have an uncleavable N-term signal seq.
Amino Acid Composition of Predicted Mature Form:
      calculated from 1
ALOM new cnt: 1 ** thrshld changed to −2
Cleavable signal was detected in ALOM?: 0B
ALOM: finding transmembrane regions (Klein et al.)
        count: 1  value: −2.44  threshold: −2.0
```

| | |
|---|---|
| INTEGRAL | Likelihood = −2.44 Transmembrane 2-18 (1-20) |
| PERIPHERAL | Likelihood = 1.22 |

```
        modified ALOM score:  0.59
>>> Seems to be a Type II (Ncyt Cexo) membrane protein
        The cytoplasmic tail is from 1 to 1 (1 Residues)
Rule: vesicular pathway
Rule: vesicular pathway
Rule: vesicular pathway
(5) or uncleavable?
Gavel: Examining the boundary of mitochondrial targeting seq.
          motif at: 5
        Uncleavable? Ipos set to: 15
Discrimination of mitochondrial target seq.:
        notclr (1.48)
Rule: vesicular pathway
Rule: vesicular pathway
Rule: vesicular pathway
*** Reasoning Step: 2
Relative position of the cytoplasmic tail: 1%
        Larger value (>30%) is favared for ER memb. proteins
Memb.protein with uncleavable signl is often at ER
KDEL  Count: 0
Checking apolar signal for intramitochondrial sorting
    (Gavel position 15)  from: 64  to: 93  Score: 30.0
>>> Seems to have an intramitochondrial signal
SKL motif (signal for peroxisomal protein):
        pos: −1(63), count: 0
Amino Acid Composition Tendency for Peroxisome: 1.91
Peroxisomal proteins? Status: notclr
        AAC score (peroxisome): 0.161
Amino Acid Composition tendency for lysosomal proteins
        score: 0.04 Status: notclr
Checking the consensus for Golgi
Checking the consensus for Golgi
Checking the cytoplasmic tail of type II (Golgi)
Checking the amount of Basic Residues (nucleus)
Checking the 4 residue pattern for Nuclear Targeting
Checking the 7 residue pattern for Nuclear Targeting
Checking the Robbins & Dingwall consensus (nucleus)
Checking the RNA binding motif (nucleus or cytoplasm)
Nuclear Signal  Status: negative (0.00)
Check mitochondrial signal for typeII (plasma memb.)
Type II is favored for plasma memb. proteins
Checking the NPXY motif..
Checking the YXRF motif..
Checking N-myristoylation..
----- Final Results -----
plasma membrane --- Certainty = 0.685(Affirmative) <succ>
endoplasmic reticulum (membrane) --- Certainty = 0.640(Affirmative) <succ>
Golgi body --- Certainty = 0.370(Affirmative) <succ>
microbody (peroxisome) --- Certainty = 0.161(Affirmative) <succ>
```

[0347] T-epitopes for SEQ ID NO: 6047 are identified in Table 21. The invention includes a polypeptide for use as an antigen, wherein the polypeptide comprises: (a) an amino acid sequence selected from the group consisting of the T-epitope sequences identified in SEQ ID NOS: 9019-9131; (b) an amino acid sequence having sequence identity to an amino acid sequence of (a). The invention further comprising a polynucleotide sequence encoding the polypeptides of (a) or (b). The invention further comprising a method of expression or delivery of such polynucleotides through viral vectors and/or viral particles. The invention further comprises a polypeptide comprising two or more of the T-epitope sequences identified in SEQ ID NOS: 9019-9131, or a polynucleotide encoding such a polypeptide.

[0348] The use as an antigen is preferably a use: (1) as a T-cell antigen; (2) for generating a complex between a class I MHC protein (e.g. a class I HLA) and a fragment of said antigen; (3) as an antigen for raising a cell-mediated immune response; and/or (4) as an antigen for raising a CTL response. The use preferably protects or treats disease and/or infection caused by a SARS virus. The invention provides the use of a polypeptide in the manufacture of a medicament for immunising a mammal (typically a human) against SARS viral infection wherein the polypeptide is as defined above.

[0349] The invention provides a method of raising an immune response in a mammal (typically a human), comprising the step of administering to the mammal a polypeptide as defined above, wherein said immune response is a cell-mediated immune response and, preferably, a CTL response. The immune response is preferably protective or therapeutic.

[0350] The invention includes a polypeptide comprising SEQ ID NO: 6048, a fragment thereof or an amino acid sequence having sequence identity thereto. Predicted transmembrane regions of SEQ ID NO: 6048 are identified below.

| | | | |
|---|---|---|---|
| from | to | score | center |

Inside to outside helices: 2 found

| | | | |
|---|---|---|---|
| 3 (3) | 18 (18) | 1857 | 10 |
| 100 (100) | 117 (115) | 2904 | 107 |

Outside to inside helices: 2 found

| | | | |
|---|---|---|---|
| 1 (1) | 15 (15) | 1299 | 8 |
| 100 (100) | 117 (115) | 3009 | 107 |

[0351] Accordingly, the invention includes a polypeptide comprising a fragment of SEQ ID NO: 6048 wherein said fragment does not include one or more of the hydrophobic amino acid sequences identified above. Preferably, the fragment does not include the amino acids between positions selected from the group consisting of 1 to 15 and 100 to 117. The invention also includes a polynucleotide sequence encoding any of the above-identified polypeptides.

[0352] SEQ ID NO: 6048 is predicted to be a hypothetical protein of SARS virus. A prediction of the protein localization of SEQ ID NO: 6048 is set forth below. SEQ ID NO: 6048 is predicted to be located in one of the following locations: plasma membrane, lysosome (membrane), microbody (peroxisome), and endoplasmic reticulum (membrane). SEQ ID NO: 6048 may be associated with an organelle inside an infected cell or may interact with a host cell plasma membrane during viral entry to the host cell.

[0353] Accordingly, SEQ ID NO: 6048 is a target for screening of chemical inhibitors to the SARS virus. The invention includes a polypeptide comprises SEQ ID NO: 6048 or a fragment thereof. The invention includes a polynucleotide encoding the polypeptide sequence of SEQ ID NO: 6048 or a fragment thereof. The invention includes a method of screening SEQ ID NO: 6048 for an inhibitor. The invention includes the recombinant expression of SEQ ID NO: 6048 in a host cell. The invention includes a small molecule which prevents the polypeptide of SEQ ID NO: 6048 from associating with an organelle inside of an infected cell or prevents the polypeptide from associating with the cell membrane of a host cell. The invention includes a fusion protein wherein said fusion protein comprises SEQ ID NO: 6048. Predicted protein localization of SEQ ID NO: 6048 is set forth below.

```
PSORT --- Prediction of Protein Localization Sites
                                        version 6.4(WWW)
Species classification: 4
*** Reasoning Step: 1
Preliminary Calculation of ALOM (threshold: 0.5)
        count: 2
        Position of the most N-terminal TMS: 3 at i = 2
MTOP: membrane topology (Hartmann et al.)
        I(middle): 10  Charge diffirence(C − N): −2.5
McG: Examining signal sequence (McGeoch)
        Length of UR:  13
        Peak Value of UR:  3.38
        Net Charge of CR: 1
        Discriminant Score:  10.02
GvH: Examining signal sequence (von Heijne)
        Signal Score (−3.5): 2.56
        Possible cleavage site: 15
>>> Seems to have a cleavable N-term signal seq.
Amino Acid Composition of Predicted Mature Form:
      calculated from 16
ALOM new cnt: 2 ** thrshld change to −2
Cleavable signal was detected in ALOM?: 1B
ALOM: finding transmembrane regions (Klein et al.)
        count: 1  value: −14.75  threshold: −2.0
```

| | |
|---|---|
| INTEGRAL | Likelihood = −14.75 Transmembrane 101-117 (95-120) |
| PERIPHERAL | Likelihood = 6.63 |

```
        modified ALOM score:  3.05
>>> Seems to be a Type Ia membrane protein
        The cytoplasmic tail is from 118 to 122 (5 Residues)
Rule: vesicular pathway
Rule: vesicular pathway
Rule: vesicular pathway
(15) or uncleavable?
Gavel: Examining the boundary of mitochondrial targeting seq.
          motif at: 15
        Uncleavable? Ipos set to: 25
Discrimination of mitochondrial target seq.:
        notclr (0.73)
Rule: vesicular pathway
Rule: vesicular pathway
Rule: vesicular pathway
*** Reasoning Step: 2
KDEL Count: 0
Checking apolar signal for intramitochondrial sorting
    (Gavel position 25)  from: 3  to: 12  Score: 8.5
SKL motif (signal for peroxisomal protein):
        pos: −1(122), count: 0
Amino Acid Composition Tendency for Peroxisome: 2.46
        AAC not from the N-term., score modified
Peroxisomal proteins? Status: notclr
        AAC score (peroxisome): 0.115
Amino Acid Composition tendency for lysosomal proteins
        score: −0.40  Status: negative
GY motif in the tail of typeIa? (lysosomal)
Checking the amount of Basic Residues (nucleus)
Checking the 4 residue pattern for Nuclear Targeting
Checking the 7 residue pattern for Nuclear Targeting
Checking the Robbins & Dingwall consensus (nucleus)
Checking the RNA binding motif (nucleus or cytoplasm)
Nuclear Signal  Status: negative (0.00)
Type Ia is favored for plasma memb. proteins
Checking the NPXY motif..
Checking the YXRF motif..
Checking N-myristoylation..
Checking GPI anchor..
>>> Seems to be GPI-anchored (0.85)
----- Final Results -----
plasma membrane --- Certainty = 0.919(Affirmative) <succ>
lysosome (membrane) --- Certainty = 0.200(Affirmative) <succ>
microbody (peroxisome) --- Certainty = 0.115(Affirmative) <succ>
endoplasmic reticulum (membrane) --- Certainty = 0.100(Affirmative) <succ>
```

[0354] T-epitopes for SEQ ID NO: 6048 are identified in Table 22. The invention includes a polypeptide for use as an antigen, wherein the polypeptide comprises: (a) an amino acid sequence selected from the group consisting of the T-epitope sequences identified in SEQ ID NOS: 9132-9308; (b) an amino acid sequence having sequence identity to an amino acid sequence of (a). The invention further comprising a polynucleotide sequence encoding the polypeptides of (a) or (b). The invention further comprising a method of expression or delivery of such polynucleotides through viral vectors and/or viral particles. The invention further comprises a polypeptide comprising two or more of the T-epitope sequences identified in SEQ ID NOS: 9132-9308, or a polynucleotide encoding such a polypeptide.

[0355] The use as an antigen is preferably a use: (1) as a T-cell antigen; (2) for generating a complex between a class I MHC protein (e.g. a class I HLA) and a fragment of said antigen; (3) as an antigen for raising a cell-mediated immune response; and/or (4) as an antigen for raising a CTL response. The use preferably protects or treats disease and/or infection caused by a SARS virus. The invention provides the use of a polypeptide in the manufacture of a medicament for immunising a mammal (typically a human) against SARS viral infection wherein the polypeptide is as defined above.

[0356] The invention provides a method of raising an immune response in a mammal (typically a human), comprising the step of administering to the mammal a polypeptide as defined above, wherein said immune response is a cell-mediated immune response and, preferably, a CTL response. The immune response is preferably protective or therapeutic.

[0357] The invention includes a polypeptide comprising SEQ ID NO: 6049, a fragment thereof or an amino acid sequence having sequence identity thereto. Predicted transmembrane or hydrophobic regions of SEQ ID NO: 6049 are identified below.

| | | | |
|---|---|---|---|
| from | to | score | center |

Inside to outside helices: 1 found

| | | | |
|---|---|---|---|
| 13 (13) | 30 (28) | 3532 | 20 |

Outside to inside helices: 1 found

| | | | |
|---|---|---|---|
| 9 (11) | 29 (26) | 3395 | 19 |

[0358] Accordingly, the invention includes a polypeptide comprising a fragment of SEQ ID NO: 6049 wherein said fragment does not include one or more of the hydrophobic amino acid sequences identified above. The invention also includes a polynucleotide sequence encoding any of the above-identified polypeptides.

[0359] SEQ ID NO: 6049 is predicted to be a hypothetical protein of SARS virus. A prediction of the protein localization of SEQ ID NO: 6049 is set forth below. SEQ ID NO: 6049 is predicted to be located in one of the following locations: outside, microbody (peroxisome), endoplasmic reticulum (membrane) and endoplasmic reticulum (lumen). The highest ranking indicates that SEQ ID NO: 6049 is located on the outside of a cell. Accordingly, SEQ ID NO: 6049 may be a surface exposed protein.

[0360] Accordingly, SEQ ID NO: 6049 may be used in an immunogenic composition to raise an immune response against the SARS virus. It also may be used to generate antibodies specific to the SARS virus. Such antibodies may be used in a method of treatment or prevention of a SARS virus infection. Such antibodies may further be used in a diagnostic test to identify the presence or absence of SARS virus in a biological sample.

[0361] The invention includes a polypeptide comprises SEQ ID NO: 6049 or a fragment thereof. The invention includes a polynucleotide encoding the polypeptide sequence of SEQ ID NO: 6049 or a fragment thereof. The invention includes a method of screening SEQ ID NO: 6049 for an inhibitor. The invention includes the recombinant expression of SEQ ID NO: 6049 in a host cell. The invention includes a fusion protein wherein said fusion protein comprises SEQ ID NO: 6049. Predicted protein localization of SEQ ID NO: 6049 is set forth below.

```
PSORT --- Prediction of Protein Localization Sites
                                        version 6.4(WWW)
Species classification: 4
*** Reasoning Step: 1
Preliminary Calculation of ALOM (threshold: 0.5)
        count: 1
        Position of the most N-terminal TMS: 11 at i = 1
MTOP: membrane topology (Hartmann et al.)
        I(middle): 18 Charge diffirence(C − N): −2.0
McG: Examining signal sequence (McGeoch)
        Length of UR:  24
        Peak Value of UR:  3.69
        Net Charge of CR: −2
        Discriminant Score:  13.56
GvH: Examining signal sequence (von Heijne)
        Signal Score (−3.5): 0.52
        Possible cleavage site: 25
>>> Seems to have a cleavable N-term signal seq.
Amino Acid Composition of Predicted Mature Form:
      calculated from 26
ALOM new cnt: 1 ** thrshld changed to −2
Cleavable signal was detected in ALOM?: 1B
ALOM: finding transmembrane regions (Klein et al.)
        count: 0  value: 14.80  threshold: −2.0
        PERIPHERAL  Likelihood = 14.80
        modified ALOM score: −3.86
Rule: vesicular pathway
Rule: vesicular pathway
Rule: vesicular pathway
(2) or uncleavable?
Gavel: Examining the boundary of mitochondrial targeting seq.
          motif at: 2
        Uncleavable? Ipos set to: 12
Discrimination of mitochondrial target seq.:
        notclr (1.42)
Rule: vesicular pathway
Rule: vesicular pathway
Rule: vesicular pathway
*** Reasoning Step: 2
KDEL  Count: 0
Number of Potential N-glycosylation Sites: 0
Out: score 0.800
Checking apolar signal for intramitochondrial sorting
    (Gavel position 12)  from: 44  to: 73  Score: 30.0
>>> Seems to have an intramitochondrial signal
SKL motif (signal for peroxisomal protein):
        pos: −1(44), count: 0
Amino Acid Composition Tendency for Peroxisome: 9.47
        AAC not from the N-term., score modified
Peroxisomal proteins? Status: notclr
        AAC score (peroxisome): 0.320
Amino Acid Composition tendency for lysosomal proteins
        score: −6.47  Status: negative
Number of NX(S/T) motif: 0
Checking the amount of Basic Residues (nucleus)
Checking the 4 residue pattern for Nuclear Targeting
Checking the 7 residue pattern for Nuclear Targeting
Checking the Robbins & Dingwall consensus (nucleus)
Checking the RNA binding motif (nucleus or cytoplasm)
Nuclear Signal  Status: negative (0.00)
Checking CaaX motif..
Checking N-myristoylation..
Checking CaaX motif..
----- Final Results -----
outside --- Certainty = 0.820(Affirmative) <succ>
microbody (peroxisome) --- Certainty = 0.320(Affirmative) <succ>
endoplasmic reticulum (membrane) --- Certainty = 0.100(Affirmative)
<succ>
endoplasmic reticulum (lumen) --- Certainty = 0.100(Affirmative) <succ>
```

[0362] T-epitopes for SEQ ID NO: 6049 are identified in Table 23. The invention includes a polypeptide for use as an antigen, wherein the polypeptide comprises: (a) an amino acid sequence selected from the group consisting of the T-epitope sequences identified in SEQ ID NOS: 9309-9437; (b) an amino acid sequence having sequence identity to an amino acid sequence of (a). The invention further comprising a polynucleotide sequence encoding the polypeptides of (a) or (b). The invention further comprising a method of expression or delivery of such polynucleotides through viral vectors and/or viral particles. The invention further comprises a polypeptide comprising two or more of the T-epitope sequences identified in SEQ ID NOS: 9309-9437, or a polynucleotide encoding such a polypeptide.

[0363] The use as an antigen is preferably a use: (1) as a T-cell antigen; (2) for generating a complex between a class I MHC protein (e.g. a class I HLA) and a fragment of said antigen; (3) as an antigen for raising a cell-mediated immune response; and/or (4) as an antigen for raising a CTL response. The use preferably protects or treats disease and/or infection caused by a SARS virus. The invention provides the use of a polypeptide in the manufacture of a medicament for immunising a mammal (typically a human) against SARS viral infection wherein the polypeptide is as defined above.

[0364] The invention provides a method of raising an immune response in a mammal (typically a human), comprising the step of administering to the mammal a polypeptide as defined above, wherein said immune response is a cell-mediated immune response and, preferably, a CTL response. The immune response is preferably protective or therapeutic.

[0365] The invention includes a polypeptide comprising SEQ ID NO: 6050 or a fragment thereof or an amino acid sequence having sequence identity thereto. Predicted transmembrane or hydrophobic regions are identified below.

| | | | |
|---|---|---|---|
| from | to | score | center |

Inside to outside helices: 1 found

| | | | |
|---|---|---|---|
| 13 (15) | 32 (30) | 558 | 23 |

Outside to inside helices: 1 found

| | | | |
|---|---|---|---|
| 16 (16) | 30 (30) | 364 | 23 |

[0366] Accordingly, the invention includes a polypeptide comprising a fragment of SEQ ID NO: 6050 wherein said fragment does not include one or more of the hydrophobic amino acid sequences identified above. The invention also includes a polynucleotide sequence encoding any of the above-identified polypeptides.

[0367] SEQ ID NO: 6050 is predicted to be a hypothetical protein of SARS virus. A prediction of the protein localization of SEQ ID NO: 6050 is set forth below. SEQ ID NO: 6050 is predicted to be located in one of the following locations: lysosome (lumen), mitochondrial matrix space, mitochondrial inner membrane, and mitochondrial intermembrane space. SEQ ID NO: 6050 may be associated with an organelle inside an infected cell during the viral replication cycle.

[0368] Accordingly, SEQ ID NO: 6050 is a target for screening of chemical inhibitors to the SARS virus. The invention includes a polypeptide comprises SEQ ID NO: 6050 or a fragment thereof. The invention includes a polynucleotide encoding the polypeptide sequence of SEQ ID NO: 6050 or a fragment thereof. The invention includes a method of screening SEQ ID NO: 6050 for an inhibitor. The invention includes the recombinant expression of SEQ ID NO: 6050 in a host cell. The invention includes a small molecule which prevents the polypeptide of SEQ ID NO: 6050 from associating with an organelle inside of an infected cell or prevents the polypeptide from associating with the cell membrane of a host cell. The invention includes a fusion protein wherein said fusion protein comprises SEQ ID NO: 6050. Predicted protein localization of SEQ ID NO: 6050 is set forth below.

PSORT --- Prediction of Protein Localization Sites

version 6.4(WWW)

```
MYSEQ 84 Residues
Species classification: 4
*** Reasoning Step: 1
Preliminary Calculation of ALOM (threshold: 0.5)
  count: 0
McG: Examining signal sequence (McGeoch)
  Length of UR: 3
  Peak Value of UR: 1.46
  Net Charge of CR: 2
  Discriminant Score: −5.73
GvH: Examining signal sequence (von Heijne)
  Signal Score (−3.5): −0.12
  Possible cleavage site: 29
>>> Seems to have no N-terminal signal seq.
Amino Acid Composition of Predicted Mature Form:
  calculated from 1
ALOM new cnt: 0 ** thrshld changed to −2
Cleavable signal was detected in ALOM?: 0B
ALOM: finding transmembrane regions (Klein et al.)
  count: 0 value: 8.43 threshold: −2.0
  PERIPHERAL Likelihood = 8.43
  modified ALOM score: −2.59
Gavel: Examining the boundary of mitochondrial targeting seq.
    motif at: 61
  ARCWYL
Discrimination of mitochondrial target seq.:
  positive (1.66)
Rule: mitochondrial protein
Rule: mitochondrial protein
Rule: mitochondrial protein
Rule: mitochondrial protein
*** Reasoning Step: 2
KDEL Count: 0
Checking apolar signal for intramitochondrial sorting
  (Gavel position 61) from: 52 to: 58 Score: 6.0
Mitochondrial matrix? Score: 0.38
SKL motif (signal for peroxisomal protein):
  pos: −1(84), count: 0
Amino Acid Composition Tendency for Peroxisome: 1.47
Peroxisomal proteins? Status: notclr
  AAC score (peroxisome): 0.263
Amino Acid Composition tendency for lysosomal proteins
  score: 2.86 Status: positive
Modified score for lysosome: 0.850
Checking the amount of Basic Residues (nucleus)
Checking the 4 residue pattern for Nuclear Targeting
Checking the 7 residue pattern for Nuclear Targeting
Checking the Robbins & Dingwall consensus (nucleus)
Checking the RNA binding motif (nucleus or cytoplasm)
Nuclear Signal Status: negative (0.00)
Checking CaaX motif..
Checking N-myristoylation..
Checking CaaX motif..
----- Final Results -----
lysosome (lumen) --- Certainty = 0.850(Affirmative) < succ>
mitochondrial matrix space --- Certainty = 0.544(Affirmative) < succ>
mitochondrial inner membrane --- Certainty = 0.266(Affirmative) < succ>
mitochondrial intermembrane space --- Certainty = 0.266(Affirmative)
< succ>
```

[0369] One predicted N-glycosylation sites of SEQ ID NO: 6050 is identified at residue 43:

| | | Jury | NGlyc | |
|---|---|---|---|---|
| Position | Potential | agreement | result | |
| 43 NVTI | 0.6713 | (9/9) | ++ | (SEQ ID NO: 7269) |

[0370] Accordingly, the invention comprises a polypeptide comprising a fragment of the amino acid sequence of SEQ ID NO: 6050 wherein said fragment comprises the N-glycosylation site identified above. The invention further comprises a polynucleotide encoding one or more of the polypeptides identified above.

[0371] The invention further comprises a polypeptide comprising a fragment of amino acid sequence SEQ ID NO: 6050 wherein said fragment does not include the N-glycosylation site identified above. The invention includes a polynucleotide encoding such a fragment.

[0372] T-epitopes for SEQ ID NO: 6050 are identified in Table 24. The invention includes a polypeptide for use as an antigen, wherein the polypeptide comprises: (a) an amino acid sequence selected from the group consisting of the T-epitope sequences identified in SEQ ID NOS: 9438-9538; (b) an amino acid sequence having sequence identity to an amino acid sequence of (a). The invention further comprising a polynucleotide sequence encoding the polypeptides of (a) or (b). The invention further comprising a method of expression or delivery of such polynucleotides through viral vectors and/or viral particles. The invention further comprises a polypeptide comprising two or more of the T-epitope sequences identified in SEQ ID NOS: 9438-9538, or a polynucleotide encoding such a polypeptide.

[0373] The use as an antigen is preferably a use: (1) as a T-cell antigen; (2) for generating a complex between a class I MHC protein (e.g. a class I HLA) and a fragment of said antigen; (3) as an antigen for raising a cell-mediated immune response; and/or (4) as an antigen for raising a CTL response. The use preferably protects or treats disease and/or infection caused by a SARS virus. The invention provides the use of a polypeptide in the manufacture of a medicament for immunising a mammal (typically a human) against SARS viral infection wherein the polypeptide is as defined above.

[0374] The invention provides a method of raising an immune response in a mammal (typically a human), comprising the step of administering to the mammal a polypeptide as defined above, wherein said immune response is a cell-mediated immune response and, preferably, a CTL response. The immune response is preferably protective or therapeutic.

[0375] The invention includes a polypeptide sequence comprising SEQ ID NO: 6051 or a fragment thereof or an amino acid sequence having sequence identity thereto. The invention includes a polypeptide sequence comprising SEQ ID NO: 6052 or a fragment thereof or an amino acid sequence having sequence identity thereto.

[0376] SEQ ID NO: 6051 and SEQ ID NO: 6052 demonstrate functional homology with a nucleocapsid protein of a coronavirus. The invention includes a diagnostic kit comprising a polypeptide comprising SEQ ID NO: 6051, SEQ ID NO: 6052 or a fragment thereof. The invention includes a diagnostic kit comprising a polynucleotide encoding SEQ ID NO: 6051, SEQ ID NO: 6052 or a fragment thereof. The invention includes an immunogenic composition comprising SEQ ID NO: 6051, SEQ ID NO: 6052 or a fragment thereof. The invention includes an antibody which recognizes a polypeptide comprising SEQ ID NO: 6051, SEQ ID NO: 6052 or a fragment thereof.

[0377] SEQ ID NO: 6051 is predicted to be phosphorylated at Ser-79; Thr-92; Ser-106; Thr-116; Thr-142; Ser-184; Ser-188; Ser-202; Ser-236; Thr-248; Ser-251; Ser-256; Thr-377. Accordingly, the invention includes a polypeptide comprising a fragment of SEQ ID NO: 6051 wherein said fragment includes one or more of the amino acid residues of SEQ ID NO: 6051 selected from the group consisting of Ser-79; Thr-92; Ser-106; Thr-116; Thr-142; Ser-184; Ser-188; Ser-202; Ser-236; Thr-248; Ser-251; Ser-256; Thr-377. The invention further includes a polypeptide comprising a fragment of SEQ ID NO: 6051 wherein said fragment does not include one or more of the amino acid residues of SEQ ID NO: 6051 selected from the group consisting of Ser-79; Thr-92; Ser-106; Thr-116; Thr-142; Ser-184; Ser-188; Ser-202; Ser-236; Thr-248; Ser-251; Ser-256; Thr-377. Two further useful fragments of the N protein (e.g. for immunoassay) are SEQ ID NOS: 9783 & 9784, which are lysine-rich and can be used to distinguish the SARS virus from other coronaviruses.

[0378] Predicted transmembrane regions of SEQ ID NO: 6051 are identified below.

| | | | |
|---|---|---|---|
| from | to | score | center |

Inside to outside helices: 1 found

| | | | |
|---|---|---|---|
| 304 (304) | 323 (319) | 495 | 312 |

Outside to inside helices: 2 found

| | | | |
|---|---|---|---|
| 304 (304) | 319 (319) | 597 | 312 |

[0379] Accordingly, the invention includes a polypeptide comprising a fragment of SEQ ID NO: 6051 wherein said fragment does not include one or more of the hydrophobic amino acid sequences identified above. The invention also includes a polynucleotide sequence encoding any of the above-identified polypeptides.

[0380] Predicted protein localization of SEQ ID NO: 6051 is set forth below. SEQ ID NO: 6051 is predicted to be localized near the nucleus, lysosome (lumen), mitochondrial matrix space, and microbody (peroxisome). The highest ranking is for localization near the nucleus. Coronavirus nucleocapsid proteins are known to bind to viral RNA. Coronavirus nucleocapsid proteins are also thought to be important for cell mediated immunity. Accordingly, the invention includes a polynucleotide comprising SEQ ID NO: 6051. The invention further includes a viral vector or particle suitable for in vivo delivery of the polynucleotide sequence comprising a SARS virus nucleocapsid polynucleotide sequence or a fragment thereof. In one embodiment, the polynucleotide comprises SEQ ID NO: 6051 or a fragment thereof. The invention further includes a method for eliciting a cell mediated immune response comprising delivering a polynucleotide encoding a SARS virus nucleocapsid protein or a fragment thereof to a mammal. In one embodiment, the polynucleotide comprising SEQ ID NO: 6051 or a fragment thereof.

[0381] The invention further includes a method of screening SEQ ID NO: 6051 for an inhibitor. The invention includes the recombinant expression of SEQ ID NO: 6051 in a host cell. The invention includes a small molecule which prevents the polypeptide of SEQ ID NO: 6051 from binding to SARS virus RNA during viral replication. The invention includes a fusion protein wherein said fusion protein comprises SEQ ID NO: 6051. Predicted protein localization of SEQ ID NO: 6051 is set forth below.

PSORT --- Prediction of Protein Localization Sites

version 6.4(WWW)

```
Species classification: 4
*** Reasoning Step: 1
Preliminary Calculation of ALOM (threshold: 0.5)
  count: 0
McG: Examining signal sequence (McGeoch)
  Length of UR: 3
  Peak Value of UR: 0.19
  Net Charge of CR: 0
  Discriminant Score: −15.98
GvH: Examining signal sequence (von Heijne)
  Signal Score (−3.5): −6.36
  Possible cleavage site: 58
>>> Seems to have no N-terminal signal seq.
Amino Acid Composition of Predicted Mature Form:
  calculated from 1
ALOM new cnt: 0 ** thrshld changed to −2
Cleavable signal was detected in ALOM?: 0B
ALOM: finding transmembrane regions (Klein et al.)
  count: 0 value: 5.04 threshold: −2.0
  PERIPHERAL Likelihood = 5.04
  modified ALOM score: −1.91
Gavel: Examining the boundary of mitochondrial targeting seq.
  motif at: 17
  PRITFG
Discrimination of mitochondrial target seq.:
  negative (−3.97)
*** Reasoning Step: 2
KDEL Count: 0
Checking apolar signal for intramitochondrial sorting
Mitochondrial matrix? Score: 0.10
SKL motif (signal for peroxisomal protein):
  pos: −1(399), count: 0
Amino Acid Composition Tendency for Peroxisome: 0.04
Peroxisomal proteins? Status: notclr
  AAC score (peroxisome): 0.072
Amino Acid Composition tendency for lysosomal proteins
  score: 0.96 Status: notclr
Modified score for lysosome: 0.246
Checking the amount of Basic Residues (nucleus)
Checking the 4 residue pattern for Nuclear Targeting
  Found: pos: 256 (4) KKPR
  Found: pos: 372 (5) KKKK
Checking the 7 residue pattern for Nuclear Targeting
Checking the Robbins & Dingwall consensus (nucleus)
  Found: pos: 372 (3) KK KKTDEAQPLP QRQKK
Found: pos: 373 (3) KK KTDEAQPLPQ RQKKQ
Final Robbins Score (nucleus): 0.80
Checking the RNA binding motif (nucleus or cytoplasm)
nuc modified. Score: 0.90
Nuclear Signal Status: positive (0.90)
Checking CaaX motif..
Checking N-myristoylation..
Checking CaaX motif..
----- Final Results -----
nucleus --- Certainty = 0.980(Affirmative) < succ>
lysosome (lumen) --- Certainty = 0.246(Affirmative) < succ>
mitochondrial matrix space --- Certainty = 0.100(Affirmative) < succ>
microbody (peroxisome) --- Certainty = 0.072(Affirmative) < succ>
```

[0382] Predicted N-glycosylation sites of SEQ ID NO: 6051 are identified below.

| | | Jury | NGlyc | |
|---|---|---|---|---|
| Position | Potential | agreement | result | |
| 48 NNTA | 0.6879 | (9/9) | ++ | (SEQ ID NO: 7270) |
| 270 NVTQ | 0.7684 | (9/9) | +++ | (SEQ ID NO: 7271) |

[0383]

| Residue No. | | Potential | Threshold | Assignment |
|---|---|---|---|---|
| Thr | 166 | 0.8547 | 0.6439 | T |
| Thr | 367 | 0.5575 | 0.5403 | T |
| Thr | 394 | 0.8217 | 0.5821 | T |

[0384] Accordingly, the invention comprises a polypeptide comprising a fragment of the amino acid sequence of SEQ ID NO: 6051 wherein said fragment comprises one or more of the N-glycosylation sites identified above. The invention further comprises a polynucleotide encoding one or more of the polypeptides identified above.

[0385] The invention further comprises a polypeptide comprising a fragment of amino acid sequence SEQ ID NO: 6051 wherein said fragment does not include one or more of the N-glycosylation sites identified above. The invention includes a polynucleotide encoding such a fragment.

[0386] T-epitopes for SEQ ID NO: 6052 are identified in Table 25. The invention includes a polypeptide for use as an antigen, wherein the polypeptide comprises: (a) an amino acid sequence selected from the group consisting of the T-epitope sequences identified in SEQ ID NOS: 9539-9752; (b) an amino acid sequence having sequence identity to an amino acid sequence of (a). The invention further comprising a polynucleotide sequence encoding the polypeptides of (a) or (b). The invention further comprising a method of expression or delivery of such polynucleotides through viral vectors and/or viral particles. The invention further comprises a polypeptide comprising two or more of the T-epitope sequences identified in SEQ ID NOS: 9539-9752, or a polynucleotide encoding such a polypeptide.

[0387] A variant of SEQ ID NO: 6052 that is included within the invention is SEQ ID NO: 9964. Compared to SEQ ID NO: 6052, this sequence has Ile at residue 54 instead of Thr.

[0388] The use as an antigen is preferably a use: (1) as a T-cell antigen; (2) for generating a complex between a class I MHC protein (e.g. a class I HLA) and a fragment of said antigen; (3) as an antigen for raising a cell-mediated immune response; and/or (4) as an antigen for raising a CTL response. The use preferably protects or treats disease and/or infection caused by a SARS virus. The invention provides the use of a polypeptide in the manufacture of a medicament for immunising a mammal (typically a human) against SARS viral infection wherein the polypeptide is as defined above.

[0389] The invention provides a method of raising an immune response in a mammal (typically a human), comprising the step of administering to the mammal a polypeptide as defined above, wherein said immune response is a cell-mediated immune response and, preferably, a CTL response. The immune response is preferably protective or therapeutic.

[0390] The invention includes a composition comprising a SARS virus nucleocapsid protein or a fragment thereof and further comprising a SARS virus membrane protein or a fragment thereof. The composition may further comprising one or more adjuvants discussed below.

[0391] The invention further includes a composition comprising a polypeptide comprising SEQ ID NO: 6051 or a fragment thereof or a sequence having sequence identity thereto and further comprising a polypeptide comprising SEQ ID NO: 6040, or a fragment thereof or a sequence having sequence identity thereto. Such composition may be used, for instance, in a vaccine. Such composition may further comprise one or more adjuvants discussed below.

[0392] The invention includes a composition comprising a SARS virus nucleocapsid protein or a fragment thereof and a SARS virus spike protein or a fragment thereof. In one embodiment the nucleocapsid protein comprises a polypeptide sequence comprising SEQ ID NO: 6051 or a fragment thereof or a sequence having sequence identity thereto. In one embodiment, the spike protein comprises a polynucleotide comprising SEQ ID NO: 6042 or a fragment thereof or a sequence having sequence identity thereto. The composition may further comprise one or more of the adjuvants discussed below.

[0393] The invention further includes a composition comprising antibodies specific to a SARS virus nucleocapsid protein and comprising antibodies specific to a SARS virus spike protein. In one embodiment the antibody is specific to a nucleocapsid protein comprises a polypeptide sequence comprising SEQ ID NO: 6051 or a fragment thereof or a sequence having sequence identity thereto. In one embodiment, the antibody is is specific to a spike protein comprises a polynucleotide comprising SEQ ID NO: 6042 or a fragment thereof or a sequence having sequence identity thereto.

[0394] The invention further includes polynucleotide sequences, and fragments thereof, of a SARS virus which are conserved among coronaviruses, and polypeptides encoded thereby. Such conserved sequences can be identified in the alignments shown in FIG. 7. Such conserved sequences may be used in the vaccines of the invention or in the diagnostic reagents, kits and methods of the invention.

[0395] The invention further includes polynucleotide sequences, and fragments thereof, of a SARS virus which are specific to SARS virus and not shared with coronaviruses. Such SARS specific sequences are also identified as SEQ ID NOS: 6040, 6043, 6044, 6047, 6048, 6049 and 6050. Such SARS specific sequences may be used in the vaccines of the invention or in the diagnostic reagents, kits and methods of the invention.

[0396] The invention also includes polynucleotide sequences which can be used as probes or primers for diagnostic reagents, kits (comprising such reagents) and methods which can be used to diagnose or identify the presence or absence of a SARS virus in a biological sample. The invention includes a polynucleotide sequence comprising one or more of the primer sequences identified in SEQ ID NOS: 6076-6265 (Table 5). The invention further includes polynucleotide sequence comprising the complement of one or more of the primer sequences identified in SEQ ID NOS: 6076-6265.

[0397] The invention also includes polynucleotide sequences which can be used as probes or primers for diagnostic reagents, kits (comprising such reagents) and methods which can be used to diagnose or identify the presence or absence of a SARS virus in a biological sample. The invention includes a polynucleotide sequence comprising one or more of the primer sequences identified in SEQ ID NOS: 6266-6343 (Table 6). The invention further includes polynucleotide sequence comprising the complement of one or more of the primer sequences identified in SEQ ID NOS: 6266-6343.

[0398] The invention also includes polynucleotide sequences which can be used as probes or primers for diagnostic reagents, kits (comprising such reagents) and methods which can be used to diagnose or identify the presence or absence of a SARS virus in a biological sample. The invention includes a polynucleotide sequence comprising one or more of the primer sequences identified in SEQ ID NOS: 6344-6392 (Table 7). The invention further includes polynucleotide sequence comprising the complement of one or more of the primer sequences identified in SEQ ID NOS: 6344-6392.

[0399] The invention also includes polynucleotide sequences which can be used as probes or primers for diagnostic reagents, kits (comprising such reagents) and methods which can be used to diagnose or identify the presence or absence of a SARS virus in a biological sample. The invention includes a polynucleotide sequence comprising one or more of the primer sequences identified in SEQ ID NOS: 6393-6559 (Tables 8 & 9). The invention further includes polynucleotide sequence comprising the complement of one or more of the primer sequences identified in SEQ ID NOS: 6393-6559.

[0400] The invention also includes polynucleotide sequences which can be used as probes or primers for diagnostic reagents, kits (comprising such reagents) and methods which can be used to diagnose or identify the presence or absence of a SARS virus in a biological sample. The invention includes a polynucleotide sequence comprising one or more of the primer and probe sequences identified in SEQ ID NOS: 6560-6568. The invention further includes polynucleotide sequence comprising the complement of one or more of the primer sequences identified in SEQ ID NOS: 6560-6568.

[0401] The invention includes a polypeptide sequence comprising any one of even-numbered SEQ ID NOS: 7272-7290, or a fragment thereof, or a sequence having sequence identity thereto. The invention further includes a polynucleotide sequence encoding any one of even-numbered SEQ ID NOS: 7272-7290, or a fragment thereof, or a sequence having sequence identity thereto. Examples of such polynucleotide sequences are odd-numbered SEQ ID NOS: 7273-7291.

[0402] The invention includes a polynucleotide sequence comprising an intergenic sequence which is common to each open reading frame of the SARS virus. The SARS virus is thought to use this sequence to signal translation of the open reading frame. The intergenic sequence comprises a 10 mer SEQ ID NO: 7292, or optionally a hexamer SEQ ID NO: 7293. When the virus transcribes its positive (+) RNA strand to (−) RNA strand, the virus replicating structure uses the (−) strand template to transcribe nucleotides at the 5′ end prior to the first intergenic sequence, followed by the intergenic sequence, followed by the selected open reading frame. The virus then creates multiple mRNAs comprising the 5′ end, the intergenic sequence and coding sequence. For more details on Nidovriales replication (including Coronavirus) see e.g., Ziebuhr et al., “Virus-encoded proteinases and proteolytic processing in the Nidovirales”, Journal of General Virology 81:853-879 (2000), incorporated herein by reference in its entirety.

[0403] The invention comprising a polynucleotide sequence comprising SEQ ID NO: 7292 or the complement thereof. The invention comprising a polynucleotide sequence comprising SEQ ID NO: 7293 or the complement thereof. The invention further comprises a polynucleotide sequence comprising nucleotides from the 5′ end of the SARS viral genome, or its reverse complement, and farther comprising an intergenic sequence or its reverse complement. The polynucleotide may further comprise one or more of the SARS virus open reading frames. Examples of polynucleotide sequences comprising nucleotides from the 5′ end of the SARS virus genome followed by the intergenic sequence are SEQ ID NOS: 7294-7301.

[0404] The invention includes a polynucleotide sequence comprising a sequence selected from the group consisting of SEQ ID NO: 7292, SEQ ID NO: 7293, SEQ ID NO: 7294, SEQ ID NO: 7295, SEQ ID NO: 7296, SEQ ID NO: 7297, SEQ ID NO: 7298, SEQ ID NO: 7299, SEQ ID NO: 7300 and SEQ ID NO: 7301, or a fragment thereof, or a sequence having sequence identity thereto. In one embodiment, the polynucleotide does not consist entirely of a known SARS virus sequence.

[0405] The SARS virus intergenic sequence can be used to create a RNAi molecule. Such a SARS virus specific RNAi molecule can be used to treat SARS virus infection. The invention includes a RNAi molecule comprising a double stranded RNA molecule wherein one RNA strand comprises a sequence selected from the group consisting of SEQ ID NO: 7292, SEQ ID NO: 7293, SEQ ID NO: 7294, SEQ ID NO: 7295, SEQ ID NO: 7296, SEQ ID NO: 7297, SEQ ID NO: 7298, SEQ ID NO: 7299, SEQ ID NO: 7300 and SEQ ID NO: 7301, or a fragment thereof. Preferably, said RNA strand comprises a sequence selected from the group consisting of SEQ ID NO: 7292 and SEQ ID NO: 7293. Preferably, the other RNA strand comprises the reverse complement of the first strand or a polynucleotide sequence which hybridizes to the first strand.

[0406] The invention includes the use of RNAi in a method of treatment for SARS virus infection comprising administering to a mammal an effective amount of the si RNA molecule. Preferably, the RNAi molecule comprises the molecule described above. Further discussion of the RNAi applications of the intergenic sequence is included in section IV of the specification below.

[0407] The invention also includes the use of a SARS virus antisense nucleotide sequence, preferably antisense directed to the SARS virus intergenic sequence. Such an antisense sequence may be used in the treatment of a subject infected with the SARS virus. The antisense of the SARS virus intergenic sequence can be designed to bind to the SARS viral polynucleotides to block access of the viral replication machinery to the intergenic sequence. Such an antisense sequence may also be used to identify the presence or absence of a SARS virus in a biological sample. The antisence can itself be labeled or the antisense associated with viral polynucleotides can be detected by means known in the art.

[0408] Antisense nucleic acids are designed to specifically bind to RNA, resulting in the formation of RNA-DNA or RNA-RNA hybrids, with an arrest of DNA replication, reverse transcription or messenger RNA translation. Antisense polynucleotides based on a selected sequence can interfere with expression of the corresponding gene. Antisense polynucleotides will bind and/or interfere with the translation of the corresponding mRNA.

[0409] The invention also includes the use of the intergenic region with a ribozyme.

[0410] Trans-cleaving catalytic RNAs (ribozymes) are RNA molecules possessing endoribonuclease activity. Ribozymes are specifically designed for a particular target, and the target message must contain a specific nucleotide sequence. They are engineered to cleave any RNA species site-specifically in the background of cellular RNA. The cleavage event renders the mRNA unstable and prevents protein expression. Importantly, ribozymes can be used to inhibit expression of a gene of unknown function for the purpose of determining its function in an in vitro or in vivo context, by detecting the phenotypic effect.

[0411] One commonly used ribozyme motif is the hammerhead, for which the substrate sequence requirements are minimal. Design of the hammerhead ribozyme is disclosed in Usman et al., Current Opin. Struct. Biol. (1996) 6:527-533. Usman also discusses the therapeutic uses of ribozymes. Ribozymes can also be prepared and used as described in Long et al., FASEB J. (1993) 7:25; Symons, Ann. Rev. Biochem. (1992) 61:641; Perrotta et al., Biochem. (1992) 31:16-17; Ojwang et al., Proc. Natl. Acad. Sci. (USA) (1992) 89:10802-10806; and U.S. Pat. No. 5,254,678. Ribozyme cleavage of HIV-I RNA is described in U.S. Pat. No. 5,144,019; methods of cleaving RNA using ribozymes is described in U.S. Pat. No. 5,116,742; and methods for increasing the specificity of ribozymes are described in U.S. Pat. No. 5,225,337 and Koizumi et al., Nucleic Acid Res. (1989) 17:7059-7071. Preparation and use of ribozyme fragments in a hammerhead structure are also described by Koizumi et al., Nucleic Acids Res. (1989) 17:7059-7071. Preparation and use of ribozyme fragments in a hairpin structure are described by Chowrira & Burke, Nucleic Acids Res. (1992) 20:2835. Ribozymes can also be made by rolling transcription as described in Daubendiek & Kool, Nat. Biotechnol. (1997) 15(3):273-277.

[0412] The hybridizing region of the ribozyme may be modified or may be prepared as a branched structure as described in Horn & Urdea, Nucleic Acids Res. (1989) 17:6959-67. The basic structure of the ribozymes may also be chemically altered in ways familiar to those skilled in the art, and chemically synthesized ribozymes can be administered as synthetic oligonucleotide derivatives modified by monomeric units. In a therapeutic context, liposome mediated delivery of ribozymes improves cellular uptake, as described in Birikh et al., Eur. J. Biochem. (1997) 245:1-16.

[0413] Therapeutic and functional genomic applications of ribozymes proceed beginning with knowledge of a portion of the coding sequence of the gene to be inhibited. In the present invention, the target sequence preferably comprises the intergeneic sequence of the SARS virus. Preferably, the sequence is selected from the group consisting of SEQ ID NO: 7292 and SEQ ID NO: 7293. A target cleavage site is selected in the target sequence, and a ribozyme is constructed based on the 5′ and 3′ nucleotide sequences that flank the cleavage site. Preferably, the 5′ nucleotide sequence includes the 5′ untranslated region of the SARS virus. The ribozyme may then further be constructed from one or more of the polynucleotide sequences selected from the group consisting of SEQ ID NO: 7294, SEQ ID NO: 7295, SEQ ID NO: 7296, SEQ ID NO: 7297, SEQ ID NO: 7298, SEQ ID NO: 7299, SEQ ID NO: 7300 and SEQ ID NO: 7301.

[0414] Antisense treatment of HIV infection is described in the following references, each of which is incorporated herein by reference in their entirety. (antisense RNA complementary to the mRNA of gag, tat, rev, env) (Sezakiel et al., 1991, J. Virol. 65:468-472; Chatterjee et al., 1992, Science 258:1485-1488; Rhodes et al., 1990, J. Gen. Virol. 71:1965. Rhodes et al., 1991, AIDS 5:145-151; Sezakiel et al., 1992, J. Virol. 66:5576-5581; Joshi et al., 1991, J. Virol. 65:5524-5530).

[0415] The invention includes the use of decoy RNA to disrupt the SARS virus replication and life cycle. Methods of making and using such decoy RNA for treatment of a viral infection are known in the art. The invention includes delivery of genes encoding, for example, the SARS virus intergenic sequence, to infected cells. Preferably, the sequence comprises one or more of the sequences selected from the group consisting of SEQ ID NO: 7292, SEQ ID NO: 7293, SEQ ID NO: 7294, SEQ ID NO: 7295, SEQ ID NO: 7296, SEQ ID NO: 7297, SEQ ID NO: 7298, SEQ ID NO: 7299, SEQ ID NO: 7300 and SEQ ID NO: 7301. Preferably, the sequence comprises one or more of the sequences selected from the group consisting of SEQ ID NO: 7292 and SEQ ID NO: 7293. Preferably, the sequence comprises SEQ ID NO: 7293.

[0416] In the present invention, delivery of intergenic sequence which is not linked to the SARS virus open reading frames disrupts the translation process of the viral RNA and decreases the production of vial proteins. Similar methods of treatment for HIV viral infection have been described. The following references discuss the use of decoy RNA of HIV TAR or RRE for treatment of HIV infection. Each of these references is incorporated herein by reference in their entirety. (Sullenger et al., 1990, Cell 63:601-608; Sullenger et al., 1991, J. Virol. 65:6811-6816; Lisziewicz et al., 1993, New Biol. 3:82-89; Lee et al., 1994, J. Virol. 68:8254-8264), ribozymes (Sarver et al., 1990, Science 247:1222-1225; Wecrasinghe et al., 1991, J. Virol. 65:5531-5534; Dropulic et al., 1992, J. Virol. 66:1432-1441; Ojwang et al., 1992, Proc. Natl. Acad. Sci. USA. 89:10802-10806; Yu et al., 1993, Proc. Natl. Acad. Sci. USA. 90:6340-6344; Yu et al., 1995, Proc. Natl. Acad. Sci. USA. 92:699-703; Yamada et al., 1994, Gene Therapy 1:38-45).

[0417] The invention includes the use of the SARS virus intergenic sequence in diagnostic reagents, kits (comprising such reagents) and methods which can be used to diagnose or identify the presence or absence of a SARS virus in a biological sample. Such diagnostic reagents, kits, and methods are further discussed in Section II of the specification.

[0418] The invention includes a pair of primers for amplifying a SARS polynucleotide sequence comprising (i) a first primer comprising a sequence which is substantially identical to a portion of a sequence selected from the group consisting of SEQ ID NO: 7292, SEQ ID NO: 7293, SEQ ID NO: 7294, SEQ ID NO: 7295, SEQ ID NO: 7296, SEQ ID NO: 7297, SEQ ID NO: 7298, SEQ ID NO: 7299, SEQ ID NO: 7300 and SEQ ID NO: 7301 and (ii) a second primer comprising a sequence which is substantially complementary to a portion of a sequence selected from the group consisting of the sequence SEQ ID NO: 1 and the sequence SEQ ID NO: 2, such that the primer pair (i) and (ii) defines a template sequence within a sequence from the group consisting of the sequence SEQ ID NO: 1 and the sequence SEQ ID NO: 2. Preferably, the (i) first primer comprises a sequence which is substantially identical to a portion of a sequence selected from the group consisting of SEQ ID NO: 7292 and SEQ ID NO: 7293. Preferably, the (i) first primer comprises a sequence which is substantially identical to a portion of the sequence of SEQ ID NO: 7293. The amplicon defined by said first and second primers is preferably between 50 and 250 nucleotides in length. The primers may optionally be labeled to facilitate their detection. Methods and compositions for use in labeling primers are discussed further in the application in Section III.

[0419] The invention further includes a pair of primers for amplifying a SARS polynucleotide sequence comprising (i) a first primer comprising a sequence which is substantially identical to a portion of the complement of a portion of a sequence selected from the group consisting of SEQ ID NO: 7292, SEQ ID NO: 7293, SEQ ID NO: 7294, SEQ ID NO: 7295, SEQ ID NO: 7296, SEQ ID NO: 7297, SEQ ID NO: 7298, SEQ ID NO: 7299, SEQ ID NO: 7300 and SEQ ID NO: 7301 and (ii) a second primer comprising a sequence which is substantially complementary to a portion of the complement of a sequence selected from the group consisting of the sequence SEQ ID NO: 1 and the sequence SEQ ID NO: 2, such that the primer pair defines a template sequence within a sequence selected from the group consisting of the sequence SEQ ID NO: 1 and the sequence SEQ ID NO: 2. The amplicon defined by said first and second primers is preferably between 50 and 250 nucleotides in length. The primers may optionally be labeled to facilitate their detection. Methods and compositions for use in labeling primers are discussed further in the application in Section III.

[0420] The invention includes a kit comprising (i) a first primer comprising a sequence which is substantially identical to a portion of a sequence selected from the group consisting of SEQ ID NO: 7292, SEQ ID NO: 7293, SEQ ID NO: 7294, SEQ ID NO: 7295, SEQ ID NO: 7296, SEQ ID NO: 7297, SEQ ID NO: 7298, SEQ ID NO: 7299, SEQ ID NO: 7300 and SEQ ID NO: 7301 and (ii) a second primer comprising a sequence which is substantially complementary to a portion of a sequence selected from the group consisting of the sequence SEQ ID NO: 1 and the sequence SEQ ID NO: 2, such that the primer pair (i) and (ii) defines a template sequence within a sequence from the group consisting of SEQ ID NO: 1 and SEQ ID NO: 2. Preferably, the (i) first primer comprises a sequence which is substantially identical to a portion of a sequence selected from the group consisting of SEQ ID NO: 7292 and SEQ ID NO: 7293. Preferably, the (i) first primer comprises a sequence which is substantially identical to a portion of the sequence of SEQ ID NO: 7293. The primers may optionally be labeled to facilitate their detection. Methods and compositions for use in labeling primers are discussed further in the application in Section III.

[0421] Other preferred kits comprise (i) a first primer comprising a sequence which is substantially identical to a portion of the complement of a portion of a sequence selected from the group consisting of SEQ ID NO: 7292, SEQ ID NO: 7293, SEQ ID NO: 7294, SEQ ID NO: 7295, SEQ ID NO: 7296, SEQ ID NO: 7297, SEQ ID NO: 7298, SEQ ID NO: 7299, SEQ ID NO: 7300 and SEQ ID NO: 7301 and (ii) a second primer comprising a sequence which is substantially complementary to a portion of the complement of a sequence selected from the group consisting of SEQ ID NO: 1 and SEQ ID NO: 2, such that the primer pair defines a template sequence within a sequence selected from the group consisting of SEQ ID NO: 1 and SEQ ID NO: 2.

[0422] The invention further includes an attenuated SARS virus for use as a vaccine wherein the intergenic region has been mutated to reduce expression of the viral structural or nonstructural proteins. The attenuated SARS virus may comprises one or more additions, deletions or insertion in one or more of the intergenic regions of the viral genome. Preferably, the attenuated SARS virus comprises an addition, deletion or insertion in one or more occurrences of the sequence selected from the group consisting of SEQ ID NO: 7292 and SEQ ID NO: 7293. Preferably, the addition, deletion or insertion occurs in one or more occurrences of SEQ ID NO: 7293.

[0423] The invention further comprises a small molecule which inhibits binding or association of the SARS viral replication machinery, such as a ribonucleoprotein, with the intergenic region of the viral genome. Preferably, the small molecule inhibits binding or association of the SARS viral machinery with a sequence selected from the group consisting of SEQ ID NO: 7292 and SEQ ID NO: 7293. Preferably, the small molecule inhbiits binding or association of the SARS viral machinery with SEQ ID NO: 7293. The invention further includes a method of screening for a small molecule for treatment of SARS viral infection comprising using an assay to identify a small molecule which interferes with the association of the SARS viral replication machinery with the intergenic region of the SARS viral genome.

[0424] The invention further provides a novel SARS polynucleotide sequence SEQ ID NO: 9968. All six reading frames of this 690 mer sequence are shown in FIG. 113. The constituent amino acid sequences from FIG. 113, having at least 4 amino acids, are listed as SEQ ID NOS: 9969 to 10032.

[0425] Accordingly the invention includes a polynucleotide sequence comprising SEQ ID NO: 9968. It also provides polynucleotide sequences having sequence identity to SEQ ID NO: 9968. The degree of sequence identity is preferably greater than 50% (e.g., 60%, 70%, 80%, 85%, 88%, 90%, 92%, 95%, 99% or more).

[0426] The invention includes an amino acid sequence encoded by the polynucleotide sequence of SEQ ID NO: 9968, including the amino acid sequences selected from the group consisting of SEQ ID NO^{S}: 9969 to 10032. Preferably, the amino acid sequence comprises SEQ ID NO: 9997 or comprises SEQ ID NO: 9998.

[0427] The invention also provides amino acid sequences having sequence identity to an amino acid sequence encoded by SEQ ID NO: 9968. The invention provides amino acids having sequence identity to an amino acid sequence selected from the group consisting of SEQ ID NO^{S}: 9969 to 10032. The degree of sequence identity is preferably greater than 50% (e.g., 60%, 70%, 80%, 85%, 88%, 90%, 92%, 95%, 99% or more).

[0428] A portion of SEQ ID NO: 9968 matches with approximately 98% identity to a previously published SARS polynucleotide sequence, commonly referred to as “BNI-1” (SEQ ID NO: 10033). BNI-1 was sequenced at Bernhard Nocht Institute for Tropical Medicine, National Reference Center for Tropical Infectious Diseases in Hamburg, Germany. The BNI-1 sequence was published on the WHO website on Apr. 4, 2003 at http://www.who.int/csr/sars/primers/en and in Dorsten et al., “Identification of a Novel Coronavirus in Patients with Severe Acute Respiratory Syndrome”, New England Journal of Medicine, published online at http://www.nejm.org on Apr. 10, 2003. Both references are incorporated herein by reference in their entirety. The six reading frames of this 302 mer sequence are shown in FIG. 114 (see also FIG. 129). The constituent amino acid sequences from FIG. 114, having at least 4 amino acids, are listed as SEQ ID NO_{S}: 10034 to 10065. An alignment of SEQ ID NO: 10034 with SEQ ID NO: 9997 is shown in FIG. 130.

[0429] The invention provides for polynucleotide sequences comprising fragments of SEQ ID NO: 9968. In one embodiment, the fragment does not consist entirely of SEQ ID NO: 10033 or of a known coronavirus.

[0430] The invention provides for amino acid sequences comprising fragments of an amino acid sequence encoded by SEQ ID NO: 9968. In one embodiment, the fragment does not consist entirely of an amino acid sequence encoded by SEQ ID NO: 10033 or a known coronavirus.

[0431] The invention provides for amino acids comprising fragments of an amino acid sequence selected from the group consisting of SEQ ID NO^{S}: 9969 to 10032. In one embodiment, the fragment does not consist entirely of an amino acid sequence encoded by the polynucleotide sequence of SEQ ID NO: 10033 or a known coronavirus.

[0432] Approximately 100 nucleotides at the 5′ end of SEQ ID NO: 9968 do not match any portion of the BNI-1 polynucleotide sequence (SEQ ID NO: 10033). This unmatched portion is set forth as SEQ ID NO: 10066. The invention thus further provides a polynucleotide comprising the sequence comprising SEQ ID NO: 10066, polynucleotide sequences having sequence identity to SEQ ID NO: 10066, or polynucleotide sequences comprising fragments of SEQ ID NO: 10066.

[0433] The invention further comprises an amino acid sequence encoded by SEQ ID NO: 10066, an amino acid sequence having sequence identity to an amino acid sequence encoded by SEQ ID NO: 10066, or an amino acid sequence comprising fragments of an amino acid sequence encoded by SEQ ID NO: 10066. Preferably, the amino acid sequence comprises SEQ ID NO: 10067.

[0434] SEQ ID NO: 9997/9998 demonstrates homology with the a region of pol 1ab of several coronaviruses. FIG. 115 shows an alignment of SEQ ID NO^{S}: 9997/9998 to amino acid sequences for pol 1ab of bovine coronavirus (SEQ ID NO: 10068), avian infectious bronchitis virus (SEQ ID NO: 10069) and murine hepatitis virus (SEQ ID NO: 10070). A consensus amino acid sequence of SEQ ID NO^{S}: 9997/9998, SEQ ID NO: 10068, SEQ ID NO: 10069, and SEQ ID NO: 10070 is shown in the bottom row of the alignment in FIG. 115 (e.g. SEQ ID NO: 10071).

[0435] As shown in FIG. 113, the polynucleotide sequence encoding SEQ ID NO: 9997 has a stop codon after codon 205, between SEQ ID NO^{S}: 9997 and 9998. Optionally, the stop codon can be removed and the amino acid sequence continued (SEQ ID NO: 10072). Accordingly, the invention provides for an amino acid sequence comprising SEQ ID NO: 9997 and/or SEQ ID NO: 9998, or SEQ ID NO: 10072, and further comprising an amino acid sequence encoding for the C-terminus of a coronavirus pol 1ab gene or a fragment thereof.

[0436] As shown in FIG. 115, SEQ ID NO^{S}: 10068, 10069, 10070 and 10071 contain amino acids prior to the N-terminus of SEQ ID NO: 9997. The invention also provides for an amino acid sequence comprising SEQ ID NO: 9997 and further comprising an amino acid sequence encoding for the N-terminus of a coronavirus pol1ab protein or a fragment thereof.

[0437] The pol1ab sequences on FIG. 115 contain a coding region indicated on the schematic of FIG. 117 by a “*”. In FIG. 115, the beginning of this genomic region is designated by the arrow crossing in front of amino acid 6080 of the consensus sequence SEQ ID NO: 10071. The end of this genomic region is designated by the arrow crossing in front of amino acid 6604 of the consensus sequence. The invention provides for an amino acid sequence comprising SEQ ID NO: 9997 and/or SEQ ID NO: 9998, or SEQ ID NO: 10072, and further comprising a first amino sequence prior to the N-terminus of said SEQ ID NO: 9997 and/or SEQ ID NO: 9998, or SEQ ID NO: 10072, wherein said first amino acid sequence has homology to an N-terminus sequence of a known coronavirus pol 1ab “*” protein or a fragment thereof.

[0438] The invention further provides for an amino acid sequence comprising SEQ ID NO: 9997 and SEQ ID NO: 9998, wherein the stop codon after SEQ ID NO: 9971 is removed (i.e. SEQ ID NO: 10072), and further comprising a second amino acid sequence following the C terminus of SEQ ID NO: 9998, wherein said second amino acid sequence is homologous with a C terminus of a known coronavirus pol 1ab “*” protein or a fragment thereof.

[0439] Examples of such proteins are shown aligned in FIG. 118, and are SEQ ID NO^{S}: 10073 to 10077. SEQ ID NO: 10073 comprises SEQ ID NO: 9997 and further comprises amino acids prior to the N-terminus and subsequent to the C-terminus from the pol 1ab “*” protein of avian infectious bronchitis virus. SEQ ID NO: 10074 comprises SEQ ID NO: 9997 and further comprises amino acids prior to the N-terminus and subsequent to the C-terminus from the pol1ab “*” protein of bovine coronavirus. SEQ ID NO: 10075 comprises SEQ ID NO: 9997 and further comprises amino acids prior to the N-terminus and subsequent to the C-terminus from the pol 1ab “*” protein of murine hepatitis virus. SEQ ID NO: 10076 comprises SEQ ID NO: 9997 and further comprises amino acids prior to the N-terminus and subsequent to the C-terminus from the consensus of the pol1ab “*” protein of avian infectious bronchitis virus, bovine coronavirus, and murine hepatitis virus (FIG. 115). SEQ ID NO: 10077 comprises the consensus sequence of SEQ ID NOS: 10073 to 10076.

[0440] The invention comprises an amino acid sequence selected from the group consisting of SEQ ID NO^{S}: 10073, 10074, 10075, 10076 and 10077. The invention further includes an amino acid sequence comprising fragments of an amino acid sequence selected from the group consisting of SEQ ID NO^{S}: 10073, 10074, 10075, 10076 and 10077. The invention further comprises an amino acid sequence with sequence identity to a sequence selected from the group consisting of SEQ ID NO^{S}: 10073, 10074, 10075, 10076 and 10077.

[0441] The invention comprises polynucleotides encoding for the amino acid sequences selected from the group consisting of SEQ ID NO^{S}: 10073, 10074, 10075, 10076 and 10077. The invention comprises polynucleotides having sequence identity to polynucleotides encoding for the amino acid sequences selected from the group consisting of SEQ ID NO^{S}: 10073, 10074, 10075, 10076 and 10077. The invention comprises fragments of polynucleotides encoding SEQ ID NO^{S}: 10073, 10074, 10075, 10076 and 10077.

[0442] As shown in FIG. 113, SEQ ID NO: 9968 includes a sequence that encodes SEQ ID NO: 10020 followed by a stop codon, giving a C-terminus threonine (Thr) residue. The corresponding sequence from an amino acid sequence encoded by BNI-1 is SEQ ID NO: 10078, which continues past the C-terminus of SEQ ID NO: 10020. Accordingly, the invention includes a protein comprising amino acid sequence SEQ ID NO: 10020 or an amino acid sequence having sequence identity to SEQ ID NO: 10020 or an amino acid sequence comprising a fragment of SEQ ID NO: 10020, wherein the C-terminus residue of said protein is a threonine. Preferably, the C-terminus of said protein is -ST. Still more preferably, the C-terminus of said protein is -EST. The invention also includes a protein comprising amino acid sequence SEQ ID NO: 10078 or an amino acid sequence having sequence identity to SEQ ID NO: 10078 or an amino acid sequence comprising a fragment of SEQ ID NO: 10078, wherein the C-terminus residue of said protein is Thr. Preferably, the C-terminus of said protein is -ST. Still more preferably, the C-terminus of said protein is -EST.

[0443] SEQ ID NO: 9968 also encodes a 54 mer amino acid sequence SEQ ID NO: 10015. The polynucleotide encoding SEQ ID NO: 10015 encodes two stop codons at its C-terminus (FIG. 113). The corresponding region from the BNI-1 sequence does not contain this 54 mer. Accordingly, the invention includes a protein comprising amino acid sequence SEQ ID NO: 10015, or an amino acid sequence having sequence identity to SEQ ID NO: 10015 or an amino acid sequence comprising a fragment of SEQ ID NO: 10015. The invention further includes a polypeptide comprising SEQ ID NO: 10015 and further comprising a first amino acid sequence prior to the N-terminus of SEQ ID NO: 10015.

[0444] SEQ ID NO: 9968 encodes the amino acid sequence SEQ ID NO: 9969. The polynucleotide sequence contains a stop codon at the C-terminus of SEQ ID NO: 9969. Accordingly, the invention includes a protein comprising amino acid sequence SEQ ID NO: 9969, or an amino acid sequence having sequence identity to SEQ ID NO: 9969. The invention further includes a polypeptide comprising SEQ ID NO: 9969 and further comprising a first amino acid sequence prior to the N-terminus of SEQ ID NO: 9969. The invention further includes a polypeptide comprising the sequence SEQ ID NO: 10079.

[0445] SEQ ID NO: 9968 encodes amino acid sequence QRT (FIG. 113), followed by a stop codon. Accordingly, the invention includes a protein comprising amino acid sequence QRT. The invention further includes a polypeptide comprising amino acid sequence QRT and further comprising a first amino acid sequence prior to the N-terminus of the sequence QRT.

[0446] SEQ ID NO: 9968 encodes amino acid sequence SEQ ID NO: 10022, followed by a stop codon at its C-terminus. Accordingly, the invention includes a protein comprising amino acid sequence SEQ ID NO: 10022, or an amino acid sequence having sequence identity to SEQ ID NO: 10022. The invention further includes a polypeptide comprising SEQ ID NO: 10022 and further comprising a first amino acid sequence prior to the N-terminus of SEQ ID NO: 10022.

[0447] SEQ ID NO: 9968 encodes amino acid sequence SEQ ID NO: 10027. Within the SEQ ID NO: 10027 coding sequence there are at least three start codons, identified with underlining in FIG. 119. The open reading frame indicated by the first start codon is SEQ ID NO: 10081. The open reading frame indicated by the second start codon is SEQ ID NO: 10082. The open reading frame indicated by the third start codon is SEQ ID NO: 10083.

[0448] The invention provides a novel SARS polynucleotide sequence SEQ ID NO: 10084. All six reading frames of this 1463 mer sequence are shown in FIG. 120 (see also FIG. 122). The constituent amino acid sequences from FIG. 120, having at least 4 amino acids, are listed as SEQ ID NOS: 10085 to 10209 (see FIGS. 120A to 120F).

[0449] The invention includes a polynucleotide sequence comprising SEQ ID NO: 10084. The invention also provides polynucleotide sequences having sequence identity to SEQ ID NO: 10084. The invention also provides for polynucleotide sequences comprising fragments of SEQ ID NO: 10084. In one embodiment, the polynucleotide fragment does not consist entirely of SEQ ID NO: 10033 or a known coronavirus polynucleotide sequence or a known SARS polynucleotide sequence.

[0450] The invention includes an amino acid sequence encoded by the polynucleotide sequence of SEQ ID NO: 10084, including the amino acid sequences of FIGS. 120A to 120F e.g. selected from the group consisting of SEQ ID NO^{S}: 10085 to 10209. Preferably, the amino acid sequence comprises SEQ ID NO: 10149.

[0451] The invention also provides amino acid sequences having sequence identity to an amino acid sequence encoded by SEQ ID NO: 10084. The invention provides amino acids having sequence identity to an amino acid sequence from FIGS. 120A to 120F e.g. selected from the group consisting of SEQ ID NO^{S}: 10085 to 10209.

[0452] The invention also provides fragments of amino acid sequences encoded by SEQ ID NO: 10084. The invention also provides fragments of amino acid sequences selected from the group consisting of SEQ ID NO^{S}: 10085 to 10209. In one embodiment, the fragment does not consist entirely of an amino acid sequence encoded by SEQ ID NO: 10033 or an amino acid sequence of a known coronavirus or an amino acid sequence of a known SARS virus. An alignment of the matching portion of SEQ ID NO: 10033 and SEQ ID NO: 10084 is included in FIG. 121.

[0453] In one embodiment, the invention comprises an amino acid sequence comprising SEQ ID NO: 10149. An alignment of the polynucleotide sequence SEQ ID NO: 10084 to the encoded SEQ ID NO: 10149 is shown in FIG. 122 (5′3′ Frame 3). Analysis of the 5′3′ Frame 3 translation by a computer program to predict start codon methionines (NetStart 1.0) (FIG. 123) reveals SEQ ID NO^{S}: 10210 to 10215.

[0454] The invention includes a protein comprising an amino acid sequence selected from the group consisting of SEQ ID NO: 10210, SEQ ID NO: 10211, SEQ ID NO: 10212, SEQ ID NO: 10213, SEQ ID NO: 10214 and SEQ ID NO: 10215. The invention includes a protein having sequence identity to an amino acid sequence selected from the group consisting of SEQ ID NO: 10210, SEQ ID NO: 10211, SEQ ID NO: 10212, SEQ ID NO: 10213, SEQ ID NO: 10214 and SEQ ID NO: 10215. In one embodiment, the protein does not consist entirely of an amino acid sequence of a known SARS virus or of a known coronavirus.

[0455] The invention includes a fragment of a protein comprising an amino acid sequence selected from the group consisting of SEQ ID NO: 10210, SEQ ID NO: 10211, SEQ ID NO: 10212, SEQ ID NO: 10213, SEQ ID NO: 10214 and SEQ ID NO: 10215. In one embodiment, the fragment does not consist entirely of an amino acid sequence of a known SARS virus or of a known coronavirus.

[0456] In one embodiment, the invention includes a polypeptide comprising the amino acid sequence selected from the group consisting of SEQ ID NO: 10210, SEQ ID NO: 10211 and SEQ ID NO: 10212. Partial results of a BLAST of SEQ ID NO: 10210 against GenBank is included in FIG. 124. These results indicate that SEQ ID NOS: 10210, 10211 and 10212 have functional similarities to a Coronavirus RNA polymerase, particularly the RNA polymerase of murine hepatitis virus, bovine coronavirus, and avian infectious bronchitis.

[0457] In one embodiment, the invention is directed to a polypeptide comprising a first amino acid sequence selected from the group consisting of SEQ ID NO: 10210, SEQ ID NO: 10211 and SEQ ID NO: 10212 and a second amino acid sequence from the C-terminus of a coronavirus ORF1ab sequence. Preferably, the second amino acid sequence is from a bovine coronavirus. One example of this embodiment is shown below as SEQ ID NO: 10216. Amino acids 1-481 of SEQ ID NO: 10216 are the first amino acid sequence of SEQ ID NO: 10210, and amino acids 482-1152 are the second amino acid sequence of the C-terminus of a bovine coronavirus orf1ab polyprotein (Gi 26008080) (NP_{—}150073.2) (SEQ ID NO: 10217).

[0458] Accordingly, the invention includes a polypeptide comprising SEQ ID NO: 10216. The invention further includes a polypeptide comprising a first amino acid sequence of SEQ ID NO: 10210 and a second amino acid sequence of SEQ ID NO: 10217. The invention further includes a polypeptide comprising a first amino acid sequence having greater than x % identity to SEQ ID NO: 10210 and a second amino acid sequence having greater than y % identity to SEQ ID NO: 10217, wherein x is greater than or equal to 85% (e.g., 86%, 87%, 88%, 89%, 90%, 91%, 92%, 93%, 94%, 95%, 96%, 97%, 98%, 99% or more) and wherein y is greater than or equal to 60% (e.g., 65%, 70%, 75%, 80%, 85%, 90%, 95%, 98%, 99% or more).

[0459] The invention also includes a polypeptide comprising a fragment of SEQ ID NO: 10210, wherein said fragment includes an epitope. Computer-predicted epitopes of SEQ ID NO: 10210, using a 17 mer window, are included in FIG. 125A (Hopp & Woods) and FIG. 125B (Kyte & Doolittle).

[0460] The amino acid sequence of SEQ ID NO: 10210 also contains two predicted glycosylation sites at amino acids 81-84 (NNTE; SEQ ID NO: 10218) and at 180-183 (NHSV; SEQ ID NO: 10219). Accordingly, the invention includes a polypeptide comprising a fragment of SEQ ID NO: 10210, wherein said fragment includes a glycosylation site. The invention further includes a polypeptide comprising a fragment of SEQ ID NO: 10210, wherein said fragment includes the Asn at position 81. Preferably, said Asn is glycosylated. The invention further includes a polypeptide comprising a fragment of SEQ ID NO: 10210, wherein said fragment includes the Asn at position 180. Preferably, said Asn is glycosylated.

[0461] In one embodiment, the invention includes a polypeptide comprising an amino acid sequence from within FIG. 120D and/or SEQ ID NO^{S}: 10150 to 10160 e.g. from SEQ ID NO^{S}: 10154, 10155, 10158 and 10160. Within SEQ ID NO: 10154 the following amino acid sequences starting with a Met and ending at a stop codon can be identified: SEQ ID NO^{S}: 10220 to 10227.

[0462] Accordingly, the invention includes a polypeptide comprising an amino acid sequence selected from the group consisting of SEQ ID NO: 10220, SEQ ID NO: 10221, SEQ ID NO: 10222, SEQ ID NO: 10223, SEQ ID NO: 10224, SEQ ID NO: 10225, SEQ ED NO: 10226 and SEQ ID NO: 10227, or a fragment thereof or an amino acid sequence having sequence identity thereto.

[0463] In one embodiment, the invention includes a polypeptide comprising the amino acid sequence within FIG. 120E e.g. from SEQ ID NO^{S}: 10161 to 10182, and in particular SEQ ID NOS: 10171 and 10176. Within SEQ ID NO^{S}: 10171 and 10176 the following amino acid sequences starting with a Met and ending at a stop codon can be identified: SEQ ID NO: 10228 and SEQ ID NO: 10229.

[0464] Accordingly, the invention includes a polypeptide comprising an amino acid sequence selected from the group consisting of SEQ ID NO: 10228 and SEQ ID NO: 10229, or a fragment thereof or an amino acid sequence having sequence identity thereto.

[0465] In one embodiment, the invention includes a polypeptide comprising an amino acid sequence from FIG. 120F e.g. SEQ ID NO^{S}: 10183 to 10209. Within FIG. 120F the following amino acid sequence starting with a Met and ending at a stop codon can be identified: SEQ ID NO: 10187. Accordingly, the invention includes a polypeptide comprising an amino acid sequence of SEQ ID NO: 10187, or a fragment thereof or an amino acid sequence having sequence identity thereto.

[0466] In one embodiment, the polynucleotides of the invention do not include one of the following primers, disclosed at http://content.nejm.org/cgi/reprint/NEJMoa030781v2.pdf.

| | |
|---|---|
| 5′GGGTTGGGACTATCCTAAGTGTGA3′ | (SEQ ID NO: 10230) |
| 5′TAACACACAACICCATCATCA3′ | (SEQ ID NO: 10231) |
| 5′CTAACATGCTTAGGATAATGG3′ | (SEQ ID NO: 10232) |
| 5′GCCTCTCTTGTTCTTGCTCGC3′ | (SEQ ID NO: 10233) |
| 5′CAGGTAAGCGTAAAACTCATC3′ | (SEQ ID NO: 10234) |

[0467] The invention also includes polynucleotide sequences which can be used as probes for diagnostic reagents, kits (comprising such reagents) and methods which can be used to diagnose or identify the presence or absence of a SARS virus in a biological sample. The invention includes the polynucleotide primers identified in Table 31 (SEQ ID NO^{S}: 10235 to 10258), the forward primers SEQ ID NO^{S}: 10259 to 10281 and the reverse primers SEQ ID NO^{S}: 10282 to 10298. The invention further includes polynucleotide sequences which are complementary to any one of these primer sequences disclosed herein.

[0468] The invention provides a SARS polynucleotide sequence SEQ ID NO: 10299. All six reading frames of this sequence are included in FIG. 126 (See also FIG. 131). The constituent amino acid sequences from FIG. 126, having at least 4 amino acids, are listed as SEQ ID NOS: 10300 to 10337.

[0469] Accordingly, the invention includes a polynucleotide sequence comprising SEQ ID NO: 10299. It also provides polynucleotide sequences having sequence identity to SEQ ID NO: 10299. The invention also provides for polynucleotide sequences comprising fragments of SEQ ID NO: 10299. In one embodiment, the polynucleotide fragment does not consist entirely of a known polynucleotide sequence of a SARS virus or a known polynucleotide sequence of a coronavirus.

[0470] The invention includes an amino acid sequence encoded by the polynucleotide sequence of SEQ ID NO: 10299, including the amino acid sequences shown in FIG. 126, and the amino acid sequences selected from the group consisting of SEQ ID NO^{S}: 10300 to 10337. Preferably, the amino acid sequence comprises SEQ ID NO: 10316.

[0471] The invention also provides amino acid sequences having sequence identity to an amino acid sequence encoded by SEQ ID NO: 10299. The invention provides amino acid sequences having identity to an amino acid sequence selected from the group consisting of SEQ ID NO^{S}: 10300 to 10337.

[0472] The invention also provides fragments of amino acid sequences encoded by SEQ ID NO: 10299. The invention also provides fragments of amino acid sequences selected from the group consisting of SEQ ID NO^{S}: 10300 to 10337. In one embodiment, the fragment does not consist entirely of a known amino acid sequence of a SARS virus or a known amino acid sequence of a coronavirus.

[0473] In one embodiment, the invention comprises an amino acid sequence comprising SEQ ID NO: 10316. Encoded open reading frames within SEQ ID NO: 10316 include SEQ ID NO: 10338 and SEQ ID NO: 10339.

[0474] In one embodiment, the invention comprises an amino acid sequence comprising a sequence from within the 5′3′ Frame 1 translation of SEQ ID NO: 10299. The following encoded open reading frame is found within this translation: SEQ ID NO: 10340.

[0475] In one embodiment, the invention comprises an amino acid sequence comprising a sequence from within the 3′5′ Frame 1 translation of SEQ ID NO: 10299. An encoded open reading frame within this translation is SEQ ID NO: 10341.

[0476] In one embodiment, the invention comprises an amino acid sequence comprising a sequence from within the 3′5′ Frame 2 translation of SEQ ID NO: 10299. An encoded open reading frame within this translation is SEQ ID NO: 10342.

[0477] The invention includes a polypeptide comprising an amino acid sequence selected from the group consisting of SEQ ID NO: 10338, SEQ ID NO: 10339, SEQ ID NO: 10340, SEQ ID NO: 10341 and SEQ ID NO: 10342. The invention includes a polypeptide having sequence identity to an amino acid sequence selected from the group consisting of SEQ ID NO: 10338, SEQ ID NO: 10339, SEQ ID NO: 10340, SEQ ID NO: 10341 and SEQ ID NO: 10342. The invention includes a fragment of a polypeptide comprising an amino acid sequence elected from the group consisting of SEQ ID NO: 10338, SEQ ID NO: 10339, SEQ ID NO: 10340, SEQ ID NO: 10341 and SEQ ID NO: 10342. In one embodiment, the fragment does not consist entirely of a known SARS virus amino acid sequence or of a known coronavirus amino acid sequence.

[0478] In one embodiment, SEQ ID NOS: 10338-10342 are used in fusion proteins. Accordingly, the start codon methionines may be removed. The invention comprises a amino acid sequence selected from the group consisting of SEQ ID NO: 10343, SEQ ID NO: 10344, SEQ ID NO: 10345, SEQ ID NO: 10346 and SEQ ID NO: 10347.

[0479] In one embodiment, the invention comprises an amino acid sequence selected from the group consisting of SEQ ID NO: 10338 and SEQ ID NO: 10339. Partial BLAST results of SEQ ID NO: 10338 against GenBank are given below:

```
>gi|133593|sp|P18457|RRPB_CVPFS RNA-DIRECTED RNA POLYMERASE (ORF1B)
  gi|93934|pir||A43489 RNA-directed RNA polymerase (EC 2.7.7.48) - porcine
transmissible gastroenteritis virus (fragment)
  gi|833161|emb|CAA37284.1| polymerase [Transmissible gastroenteritis
virus]
                    Length = 533
  Score = 131 bits (329), Expect = 3e−30
  Identities = 55/89 (61%), Positives = 69/89 (77%), Gaps = 1/89 (1%).
Query: 1 MLWCKDGHVETFYPKLQASQAWQPGVAMPNLYKMQRMLLEKCDLQNYGENAVIPKGIMMN 60
                      MLWC++ H++TFYP+LQ+++ W PG +MP LYK+QRM LE+C+L NYG +P GI N
Sbjct: 217 MLWCENSHIKTFYPQLQSAE-WNPGYSMPTLYKIQRMCLERCNLYNYGAQVKLPDGITTN 275
Query: 61 VAKYTQLCQYLNTLTLAVPSNMRVIHFGA 89
                      V KYTQLCQYLNT TL VP MRV+H GA
Sbjct: 276 VVKYTQLCQYLNTTTLCVPHKMRVLHLGA 304
```

[0480] These results indicate that SEQ ID NO: 10338 has functional similarities to an RNA-directed RNA polymerase of porcine transmissible gastroenteritis virus.

[0481] Partial BLAST results of SEQ ID NO: 10339 against GenBank are given below:

```
>gb|AAL57305.1|replicase [bovine coronavirus]
                    Length = 7094
  Score = 139 bits (351), Expect = 7e−33
  Identities = 64/108 (59%), Positives = 78/108 (72%)
Query: 1 MSVISKVVKVTIDYAEISFMLWCKDGHVETFYPKLQASQAWQPGVAMPNLYKMQRMLLEK 60
                          M+ +SKVV V +D+ + FMLWC D V TFYP+LQA+ W+PG +MP LYK +E+
Sbjct: 6760 LNCVSKVVNVNVDFKDFQFMLWCNDEKVMTFYPRLQAASDWKPGYSMPVLYKYLNSPMER 6819
Query: 61 CDLQNYGENAVIPKGIMMNVAKYTQLCQYLNTLTLAVPSNMRVIHFGA 108
                          L NYG+ +P G MMNVAKYTQLCQYLNT TLAVP NMRV+H GA
Sbjct: 6820 VSLWNYGKPVTLPTGCMMNVAKYTQLCQYLNTTTLAVPVNMRVLHLGA 6867
```

[0482] These results indicate that SEQ ID NO: 10339 has functional similarities to a replicase of bovine coronavirus.

[0483] The SARS virus may contain polymorphism at the Glu-20 residue of SEQ ID NO: 10338. The invention includes a polypeptide comprising an amino acid sequence having sequence identity to SEQ ID NO: 10338, wherein said polypeptide includes an amino acid sequence selected from the group consisting of ASQAW (SEQ ID NO: 10348) and ASRAW (SEQ ID NO: 10349). The invention includes a fragment of a polypeptide comprising SEQ ID NO: 10338, wherein said fragment includes an amino acid sequence selected from the group consisting of SEQ ID NO: 10348 and SEQ ID NO: 10349.

[0484] The SARS virus may contain polymorphism at the Ser-80 residue of SEQ ID NO: 10338. below. The invention includes a polypeptide comprising an amino acid sequence having sequence identity to SEQ ID NO: 10338, wherein said polypeptide includes an amino acid sequence selected from the group consisting of VPSNM (SEQ ID NO: 10350) and VPTNM (SEQ ID NO: 10351). The invention includes a fragment of a polypeptide comprising SEQ ID NO: 10338, wherein said fragment includes an amino acid sequence selected from the group consisting of SEQ ID NO: 10350 and SEQ ID NO: 10351.

[0485] The invention also includes polynucleotide sequences which can be used as probes for diagnostic reagents, kits (comprising such reagents) and methods which can be used to diagnose or identify the presence or absence of a SARS virus in a biological sample. The invention includes a polynucleotide sequence comprising one or more of the primer sequences identified in Table 32. The invention further includes polynucleotide sequence comprising the complement of one or more of the primer sequences identified in Table 32.

[0486] The invention provides a SARS polynucleotide sequence SEQ ID NO: 10505. All six reading frames of this sequence are shown in FIG. 127 (see also FIG. 132). The constituent amino acid sequences from FIG. 127, having at least 4 amino acids, are listed as SEQ ID NOS: 10506 to 10570.

[0487] The invention includes a polynucleotide sequence comprising SEQ ID NO: 10505. The invention also provides polynucleotide sequences having sequence identity to SEQ ID NO: 10505. The invention also provides for polynucleotide sequences comprising fragments of SEQ ID NO: 10505. In one embodiment, the polynucleotide fragment does not consist entirely of a known SARS virus polynucleotide sequence or of a known coronavirus polynucleotide sequence.

[0488] The invention includes an amino acid sequence encoded by the polynucleotide sequence of SEQ ID NO: 10505, including the amino acid sequences shown in FIG. 127, and particularly those selected from the group consisting of SEQ ID NO^{S}: 10506 to 10570. Preferably, the amino acid sequence comprises SEQ ID NO: 10532 and/or SEQ ID NO: 10533.

[0489] The invention also provides amino acid sequences having sequence identity to an amino acid sequence encoded by SEQ ID NO: 10505. The invention provides amino acid sequences having sequence identity to an amino acid sequence selected from the group consisting of the sequences shown in FIG. 127, and in particular SEQ ID NO^{S}: 10506 to 10570.

[0490] The invention also provides fragments of amino acid sequences encoded by SEQ ID NO: 10505. The invention also provides fragments of amino acid sequences selected from the group consisting of SEQ ID NO^{S}: 10506 to 10570. In one embodiment, the fragment does not consist entirely of a known amino acid sequence of a SARS virus or a known amino acid sequence of a coronavirus.

[0491] In one embodiment, the invention includes a polypeptide comprising an amino acid sequence from the 5′3′ Frame 3 of FIG. 127. Some encoded open reading frames within this translation are: SEQ ID NO: 10533; SEQ ID NO: 10571; SEQ ID NO: 10572; SEQ ID NO: 10573; SEQ ID NO: 10574.

[0492] The invention includes a polypeptide sequence comprising an amino acid sequence selected from the group consisting of SEQ ID NO: 10533, SEQ ID NO: 10571, SEQ ID NO: 10572, SEQ ID NO: 10573 and SEQ ID NO: 10574. The invention includes a polypeptide having sequence identity to the amino acid sequence selected from the group consisting of SEQ ID NO: 10533, SEQ ID NO: 10571, SEQ ID NO: 10572, SEQ ID NO: 10573 and SEQ ID NO: 10574. The invention includes a fragment of a polypeptide sequence comprising an amino acid sequence selected from the group consisting of SEQ ID NO: 10533, SEQ ID NO: 10571, SEQ ID NO: 10572, SEQ ID NO: 10573 and SEQ ID NO: 10574.

[0493] Partial BLAST results of SEQ ID NO: 10533 against GenBank are given below:

```
>gi|7739601|gb|AAF68926.1|AF207902_11 nucleocapsid protein [murine
hepatitis virus strain ML-11]
                    Length = 451
  Score = 147 bits (370), Expect = 3e−34
  Identities = 102/252 (40%), Positives = 137/252 (54%), Gaps = 18/252 (7%)
Query: 49 SWFTALTQHGK-EELRFPRGQGVPINTNSGPDDQIGYYRRATRR-VRGGDGKMKELSPRW 106
                      SWF+ +TQ K +E +F +GQGVPI + +Q GY+ R RR + DG+ K+L PRW
Sbjct: 63 SWFSGITQFQKGKEFQFAQGQGVPIASGIPASEQKGYWYRHNRRSFKTPDGQHKQLLPRW 122
Query: 107 YFYYLGTGPEASLPYGANKEGIVWVATEGALNTPKDHIGTRNPNNNAATVLQLPQGTTLP 166
                      YFYYLGTGP A YG + EG+VWVA++ A + R+P+++ A + GT LP
Sbjct: 123 YFYYLGTGPHAGAEYGDDIEGVVWVASQQADTKTTADVVERDPSSHEAIPTRFAPGTVLP 182
Query: 167 KGFYAEGSRGGSQASSRSSSRSRGNSRNSTPGSSRGNSPARMASGGGETALALLLLDRLN 226
                      +GFY EGS + AS S N SS PA +A L+L +L
Sbjct: 183 QGFYVEGSGRSAPASRSGSRSQSRGPNNRARSSSNQRQPASAVKPDMAEEIAALVLAKLG 242
Query: 227 QLESKVSGKGQQQQGQTVTKKSAAEASK----KPRQKRTATKQYNVTQAFGRRGPEQTQG 282
                      + GQ +Q VTK+SA E + KPRQKRT KQ V Q FG+RGP Q
Sbjct: 243 K------DAGQPKQ---VTKQSAKEVRQKILTKPRQKRTPNKQCPVQQCFGKRGPNQ--- 290
Query: 283 NFGDQDLIRQGT 294
                      NFG ++++ GT
Sbjct: 291 NFGGSEMLKLGT 302
>gi|3132999|gb|AAC16422.1| nucleocapsid protein [murine hepatitis virus
strain 2]
                    Length = 451
  Score = 147 bits (370), Expect = 3e−34
  Identities = 102/252 (40%), Positives = 137/252 (54%), Gaps = 18/252 (7%)
Query: 49 SWFTALTQHGK-EELRFPRGQGVPINTNSGPDDQIGYYRRATRR-VRGGDGKMKELSPRW 106
                      SWF+ +TQ K +E +F +GQGVPI + +Q GY+ R RR + DG+ K+L PRW
Sbjct: 63 SWFSGITQFQKGKEFQFAQGQGVPIASGIPASEQKGYWYRHNRRSFKTPDGQHKQLLPRW 122
Query: 107 YFYYLGTGPEASLPYGANKEGIVWVATEGALNTPKDHIGTRNPNNNAATVLQLPQGTTLP 166
                      YFYYLGTGP A YG + EG+VWVA++ A + R+P+++ A + GT LP
Sbjct: 123 YFYYLGTGPHAGAEYGDDIEGVVWVASQQADTKTTADVVERDPSSHEAIPTKFAPGTVLP 182
Query: 167 KGFYAEGSRGGSQASSRSSSRSRGNSRNSTPGSSRGNSPARMASGGGETALALLLLDRLN 226
                      +GFY EGS + AS S N SS PA +A L+L +L
Sbjct: 183 QGFYVEGSGKSAPASRSGSRSQSRGPNNRARSSSNQRQPASAVKPDMAEEIAALVLAKLG 242
Query: 227 QLESKVSGKGQQQQGQTVTKKSAAEASK----KPRQKRTATKQYNVTQAFGRRGPEQTQG 282
                      + GQ +Q VTK+SA E + KPRQKRT KQ V Q FG+RGP Q
Sbjct: 243 K------DAGQPKQ---VTKQSAKEVRQKILTKPRQKRTPNKQCPVQQCFGKRGPNQ--- 290
Query: 283 NFGDQDLIRQGT 294
                      NFG ++++ GT
Sbjct: 291 NFGGSEMLKLGT 302
>gi|127877|sp|P03417|NCAP_CVMJH Nucleocapsid protein
  gi|174859|pir||VHIHMJ nucleocapsid protein - murine hepatitis virus
(strain JHM)
  gi|58973|emb|CAA25497.1| nucleocapsid protein [Murine hepatitis virus]
                    Length = 455
  Score = 146 bits (369), Expect = 4e−34
  Identities = 110/254 (43%), Positives = 142/254 (55%), Gaps = 22/254 (8%)
Query: 49 SWFTALTQHGK-EELRFPRGQGVPINTNSGPDDQIGYYRRATRR-VRGGDGKMKELSPRW 106
                      SWF+ +TQ K +E +F +GQGVPI Q GY+ R RR + DG+ K+L PRW
Sbjct: 67 SWFSGITQFQKGKEFQFAQGQGVPIANGIPASQQKGYWYRHNRRSFKTPDGQQKQLLPRW 126
Query: 107 YFYYLGTGPEASLPYGANKEGIVWVATEGALNTPKDHIGTRNPNNNAATVLQLPQGTTLP 166
                      YFYYLGTGP A YG + EG+VWVA++ A I R+P+++ A + GT LP
Sbjct: 127 YFYYLGTGPYAGAEYGDDIEGVVWVASQQAETRTSADIVERDPSSHEAIPTRFAPGTVLP 186
Query: 167 KGFYAEGSRGGSQASSRSSSR--SRGNSRNSTPGSSRGNSPARMASGGGETALALLLLDR 224
                      +GFY EGS G S +SRS SR SRG N SS PA +A L+L +
Sbjct: 187 QGFYVEGS-GRSAPASRSGSRPQSRG-PNNRARSSSNQRQPASTVKPDMAEEIAALVLAK 244
Query: 225 LNQLESKVSGKGQQQQGQTVTKKSAAEASK----KPRQKRTATKQYNVTQAFGRRGPEQT 280
                      L + GQ +Q VTK+SA E + KPRQKRT KQ V Q FG+RGP Q
Sbjct: 245 LGK------DAGQPKQ---VTKQSAKEVRQKILNKPRQKRTPNKQCPVQQCFGKRGPNQ- 294
Query: 281 QGNFGDQDLIRQGT 294
                          NFG ++++ GT
Sbjct: 295 --NFGGPEMLKLGT 306
>gi|6625766|gb|AAF19389.1|AF201929_7 nucleocapsid protein [murine
hepatitis virus strain 2]
  gi|7769348|gb|AAF69338.1|AF208066_11 nucleocapsid protein [murine
hepatitis virus]
                    Length = 451
  Score = 146 bits (368), Expect = 5e−34
  Identities = 102/252 (40%), Positives = 137/252 (54%), Gaps = 18/252 (7%)
Query: 49 SWFTALTQHGK-EELRFPRGQGVPINTNSGPDDQIGYYRRATRR-VRGGDGKMKELSPRW 106
                      SWF+ +TQ K +E +F +GQGVPI + +Q GY+ R RR + DG+ K+L PRW
Sbjct: 63 SWFSGITQFQKGKEFQFAQGQGVPIASGIPASEQKGYWYRHNRRSFKTPDGQHKQLLPRW 122
Query: 107 YFYYLGTGPEASLPYGANKEGIVWVATEGALNTPKDHIGTRNPNNNAATVLQLPQGTTLP 166
                      YFYYLGTGP A YG + EG+VWVA++ A + R+P+++ A + GT LP
Sbjct: 123 YFYYLGTGPHAGAEYGDDIEGVVWVASQQADTKTTADVVERDPSSHEAIPTRFAPGTVLP 182
Query: 167 KGFYAEGSRGGSQASSRSSSRSRGNSRNSTPGSSRGNSPARMASGGGETALALLLLDRLN 226
                      +GFY EGS + AS S N SS PA +A L+L +L
Sbjct: 183 QGFYVEGSGRSAPASRSGSRSQSRGPNNRARSSSNQRQPASAVKPDMAEEIAALVLAKLG 242
Query: 227 QLESKVSGKGQQQQGQTVTKKSAAEASK----KPRQKRTATKQYNVTQAFGRRGPEQTQG 282
                      + GQ +Q VTK+SA E + KPRQKRT KQ V Q FG+RGP Q
Sbjct: 243 K------DAGQPKQ---VTKQSAKEVRQKILTKPRQKRTPNKQCPVQQCFGKRGPNQ--- 290
Query: 283 NFGDQDLIRQGT 294
                      NFG ++++ GT
Sbjct: 291 NFGGSEMLKLGT 302
>gi|21734854|gb|AAM77005.1|AF481863_7 phosphorylated nucleocapsid protein
N [porcine hemagglutinating encephalomyelitis virus]
                    Length = 449
  Score = 145 bits (366), Expect = 8e−34
  Identities = 107/253 (42%), Positives = 145/253 (57%), Gaps = 18/253 (7%)
Query: 49 SWFTALTQHGK-EELRFPRGQGVPINTNSGPDDQIGYYRRATRR-VRGGDGKMKELSPRW 106
                      SWF+ +TQ K +E F GQGVPI + GY+ R RR + DG ++L PRW
Sbjct: 64 SWFSGITQFQKGKEFEFAEGQGVPIAPGVPATEAKGYWYRHNRRSFKTADGNQRQLLPRW 123
Query: 107 YFYYLGTGPEASLPYGANKEGIVWVATEGA-LNTPKDHIGTRNPNNNAATVLQLPQGTTL 165
                      YFYYLGTGP A YG + +G+ WVA+ A +NTP D I R+P+++ A + P GT L
Sbjct: 124 YFYYLGTGPHAKHQYGTDIDGVFWVASNQADINTPAD-IVDRDPSSDEAIPTRFPPGTVL 182
Query: 166 PKGFYAEGSRGGSQASSRSSSRSRGNSRNSTPGSSRGNSPARMASGGGETALALLLLDRL 225
                      P+G+Y EGS G S +SRS+SR+ N S SR NS R ++ G +A D++
Sbjct: 183 PQGYYIEGS-GRSAPNSRSTSRA-PNRAPSAGSRSRANSGNRTSTPGVTPDMA----DQI 236
Query: 226 NQLESKVSGKGQQQQGQTVTKKSAAEASK----KPRQKRTATKQYNVTQAFGRRGPEQTQ 281
                          L GK + Q VTK++A E + KPRQKR+ KQ V Q FG+RGP Q
Sbjct: 237 ASLVLAKLGK-DATKPQQVTKQTAKEVRQKILNKPRQKRSPNKQCTVQQCFGKRGPNQ-- 293
Query: 282 GNFGDQDLIRQGT 294
                        NFG ++++ GT
Sbjct: 294 -NFGGGEMLKLGT 305
>gi|23295765|gb|AAL80036.1| nucleocapsid protein [porcine
hemagglutinating encephalomyelitis virus]
                    Length = 449
  Score = 145 bits (365), Expect = 1e−33
  Identities = 107/253 (42%), Positives = 145/253 (57%), Gaps = 18/253 (7%)
Query: 49 SWFTALTQHGK-EELRFPRGQGVPINTNSGPDDQIGYYRRATRR-VRGGDGKMKELSPRW 106
                      SWF+ +TQ K +E F GQGVPI + GY+ R RR + DG ++L PRW
Sbjct: 64 SWFSGITQFQKGKEFEFAEGQGVPIAPGVPSTEAKGYWYRHNRRSFKTADGNQRQLLPRW 123
Query: 107 YFYYLGTGPEASLPYGANKEGIVWVATEGA-LNTPKDHIGTRNPNNNAATVLQLPQGTTL 165
                      YFYYLGTGP A YG + +G+ WVA+ A +NTP D I R+P+++ A + P GT L
Sbjct: 124 YFYYLGTGPHAKDQYGTDIDGVFWVASNQADINTPAD-IVDRDPSSDEAIPTRFPPGTVL 182
Query: 166 PKGFYAEGSRGGSQASSRSSSRSRGNSRNSTPGSSRGNSPARMASGGGETALALLLLDRL 225
                      P+G+Y EGS G S +SRS+SR+ N S SR NS R ++ G +A D++
Sbjct: 183 PQGYYIEGS-GRSAPNSRSTSRA-PNRAPSAGSRSRANSGNRTSTPGVTPDMA----DQI 236
Query: 226 NQLESKVSGKGQQQQGQTVTKKSAAEASK----KPRQKRTATKQYNVTQAFGRRGPEQTQ 281
                          L GK + Q VTK++A E + KPRQKR+ KQ V Q FG+RGP Q
Sbjct: 237 ASLVLAKLGK-DATKPQQVTKQTAKEVRQKILNKPRQKRSPNKQCTVQQCFGKRGPNQ-- 293
Query: 282 GNFGDQDLIRQGT 294
                        NFG ++++ GT
Sbjct: 294 -NFGGGEMLKLGT 305
```

These results indicate that SEQ ID NO: 10533 has functional similarities to a coronavirus nucleocapsid protein.

[0494] In one embodiment, the invention comprises an amino acid sequence from the 5′3′ Frame 1 of FIG. 127 e.g. SEQ ID NO^{S}: 10506-10514. Some encoded open reading frames within this region are SEQ ID NO^{S}: 10575 to 10578.

[0495] Accordingly, the invention includes a polypeptide comprising the amino acid sequence selected from the group consisting of SEQ ID NO: 10575, SEQ ID NO: 10576, SEQ ID NO: 10577 and SEQ ID NO: 10578. The invention includes a polypeptide comprising an amino acid sequence having sequence identity to a sequence selected from the group consisting of SEQ ID NO: 10097, SEQ ID NO: 10576, SEQ ID NO: 10577 and SEQ ID NO: 10578. The invention includes a fragment of a polypeptide comprising an amino acid sequence selected from the group consisting of SEQ ID NO: 10097, SEQ ID NO: 10576, SEQ ID NO: 10577 and SEQ ID NO: 10578.

[0496] In one embodiment, the invention includes a polypeptide comprising an amino acid sequence from the 3′5′ Frame 2 of FIG. 127 e.g. SEQ ID NO^{S}: 10547-10559. An open reading frame within this region is SEQ ID NO: 10579.

[0497] The invention includes a polypeptide comprising an amino acid sequence of SEQ ID NO: 10579. The invention includes a polypeptide comprising an amino acid sequence having sequence identity to SEQ ID NO: 10579. The invention includes a fragment of a polypeptide comprising an amino acid sequence of SEQ ID NO: 10579.

[0498] The invention also includes polynucleotide sequences which can be used as probes for diagnostic reagents, kits (comprising such reagents) and methods which can be used to diagnose or identify the presence or absence of a SARS virus in a biological sample. The invention includes a polynucleotide sequence comprising one or more of the primer sequences identified in Table 33. The invention further includes polynucleotide sequence comprising the complement of one or more of the primer sequences identified in Table 33.

[0499] The invention includes a polynucleotide sequence comprising SEQ ID NO: 11323. A polypeptide encoded by SEQ ID NO: 11323 is SEQ ID NO: 11324.

[0500] The invention includes a polypeptide comprising SEQ ID NO: 11324, sequence having sequence identity to SEQ ID NO: 11324 and fragments of SEQ ID NO: 11324. The invention includes a fragment of SEQ ID NO: 11324, wherein said polypeptide fragment begins with a Methionine.

[0501] Accordingly, the invention includes a polynucleotide sequence comprising SEQ ID NO: 11323. It also provides polynucleotide sequences having sequence identity to SEQ ID NO: 11323. The invention also provides for polynucleotide sequences comprising fragments of SEQ ID NO: 11323. In one embodiment, the polynucleotide fragment does not consist entirely of a known SARS polynucleotide sequence or a known coronavirus polynucleotide sequence.

[0502] The invention includes an amino acid sequence encoded by the polynucleotide sequence SEQ ID NO: 11323, including the amino acid sequence of SEQ ID NO: 11324.

[0503] The invention also provides amino acid sequences having sequence identity to an amino acid sequence encoded by SEQ ID NO: 11323. The invention provides amino acid sequences having sequence identity to SEQ ID NO: 11324.

[0504] The invention provides fragments of amino acid sequences encoded by SEQ ID NO: 11323. The invention also provides fragments of amino acid sequences of SEQ ID NO: 11324. In one embodiment, the fragment does not consist entirely of a known SARS amino acid sequence or a known coronavirus amino acid sequence.

[0505] The invention also includes polynucleotide sequences which can be used as probes for diagnostic reagents, kits (comprising such reagents) and methods which can be used to diagnose or identify the presence or absence of a SARS virus in a biological sample. The invention includes a polynucleotide sequence comprising one or more of the primer sequences identified as SEQ ID NO_{S}: 11325-11440 (left part) and SEQ ID NO^{S}: 11441-11551 (right part). The invention further includes polynucleotide sequence comprising the complement of one or more of the primer sequences identified as SEQ ID NO^{S}: 11325-11551.

[0506] The invention includes a polypeptide comprising SEQ ID NO: 11552. The SARS virus contains polymorphism at the Isoleucine residue Ile-324. The invention includes a polypeptide comprising an amino acid sequence having sequence identity to SEQ ID NO: 11552, wherein said polypeptide includes an amino acid sequence selected from the group consisting of YSYAI (SEQ ID NO: 11553), SYAIH (SEQ ID NO: 11554), YAIHH (SEQ ID NO: 11555), IHHDK (SEQ ID NO: 11556), SYAI (SEQ ID NO: 11557), YAIH (SEQ ID NO: 11558), AIHH (SEQ ID NO: 11559), IHHD (SEQ ID NO: 11560), YAI, AIH, and IHH. The invention includes a fragment of a polypeptide comprising SEQ ID NO: 11552, wherein said fragment includes an amino acid sequence selected from the group consisting of YSYAI (SEQ ID NO: 11553), SYAIH (SEQ ID NO: 11554), YAIHH (SEQ ID NO: 11555), IHHDK (SEQ ID NO: 11556), SYAI (SEQ ID NO: 11557), YAIH (SEQ ID NO: 11558), AIHH (SEQ ID NO: 11559), IHHD (SEQ ID NO: 11560), YAI, AIH, and IHH.

[0507] The invention includes a polypeptide comprising an amino acid sequence selected from the group consisting of SEQ ID NO: 11561 and SEQ ID NO: 11562. The invention includes a fragment of a polypeptide comprising an amino acid sequence selected from the group consisting of SEQ ID NO: 11561 and SEQ ID NO: 11562.

[0508] The invention includes a diagnostic kit comprising a polypeptide comprising at least one of the amino acid sequences selected from the group consisting of SEQ ID NO^{S}: 11561 and 11562. The invention includes a diagnostic kit comprising a polynucleotide sequence encoding a polypeptide comprising at least one of the amino acid sequences selected from the group consisting of SEQ ID NO^{S}: 11561 and 11562. The invention includes an immunogenic composition comprising a polypeptide comprising at least one of the amino acid sequences selected from the group consisting of SEQ ID NO^{S}: 11561 and 11562. The invention includes an antibody which recognizes a polypeptide comprising at least one of the amino acid sequences selected from the group consisting of SEQ ID NO^{S}: 11561 and 11562.

[0509] The invention includes a polynucleotide sequence SEQ ID NO: 11563 or a fragment thereof or a sequence having sequence identity thereto. Polypeptide sequences which can be translated from SEQ ID NO: 11563 are shown in FIG. 128. The constituent amino acid sequences from FIG. 128, having at least 4 amino acids, are listed as SEQ ID NO^{S}: 11564 to 11617.

[0510] The invention includes a polypeptide sequence selected from the group consisting of the sequences of FIG. 128, or a fragment thereof or a sequence having sequence identity thereto e.g. SEQ ID NO^{S}: 11563 to 11617.

[0511] A polypeptide sequence within SEQ ID NO: 11600 is SEQ ID NO: 11618. The invention includes a polypeptide comprising SEQ ID NO: 11618, or a fragment thereof or a sequence having sequence identity thereto.

[0512] A polypeptide sequence within SEQ ID NO: 11602 is SEQ ID NO: 11641. The invention includes a polypeptide comprising SEQ ID NO: 11641, or a fragment thereof or a sequence having sequence identity thereto.

[0513] A polypeptide sequence within SEQ ID NO: 11609 is SEQ ID NO: 11619.

[0514] The invention includes a polynucleotide encoding (i) an amino acid sequence selected from the group consisting of: (1) the amino acid sequences of FIG. 128, and in particular SEQ ID NO^{S}: 11564-11617; (2) SEQ ID NO: 11618; and (3) SEQ ID NO: 11619, or (ii) a fragment thereof. The invention includes a diagnostic kit comprising a one or more of these proteins. The invention includes a diagnostic kit comprising a polynucleotide sequence encoding one or more of these polypeptide sequences. The invention includes an antibody which recognizes one or more of the polypeptide sequences.

[0515] The SARS virus may contain polymorphism at isoleucine residue Ile-326 in SEQ ID NO: 11620 (Chi-PEP3). The invention includes a polypeptide comprising an amino acid sequence having sequence identity to SEQ ID NO: 11620, wherein said polypeptide includes an amino acid sequence selected from the group consisting of YAIHH (SEQ ID NO: 11621) and YATHH (SEQ ID NO: 11622). The invention includes a fragment of a polypeptide comprising SEQ ID NO: 11620, wherein said fragment includes an amino acid sequence selected from the group consisting of YAIHH (SEQ ID NO: 11621) and YATHH (SEQ ID NO: 11622).

[0516] The SARS virus may contain polymorphism at glutamine residue Gln-830 in SEQ ID NO: 11620. The invention includes a polypeptide comprising an amino acid sequence having sequence identity to SEQ ID NO: 11620, wherein said polypeptide includes an amino acid sequence selected from the group consisting of ASQAW (SEQ ID NO: 11623) and ASRAW (SEQ ID NO: 11624). The invention includes a fragment of a polypeptide comprising SEQ ID NO: 11620, wherein said fragment includes an amino acid sequence selected from the group consisting of ASQAW (SEQ ID NO: 11623) and ASRAW (SEQ ID NO: 11624).

[0517] The SARS virus may contain polymorphism at aspartic acid residue Asp-935 in SEQ ID NO: 11620. The invention includes a polypeptide comprising an amino acid sequence having sequence identity to SEQ ID NO: 11620, wherein said polypeptide includes an amino acid sequence selected from the group consisting of DADST (SEQ ID NO: 11625) and DAYST (SEQ ID NO: 11626). The invention includes a fragment of a polypeptide comprising SEQ ID NO: 11620, wherein said fragment includes an amino acid sequence selected from the group consisting of DADST (SEQ ID NO: 11625) and DAYST (SEQ ID NO: 11626).

[0518] The SARS virus may contain polymorphism at serine residue Ser-577 in SEQ ID NO: 11627 (Chi-PEP4). The invention includes a polypeptide comprising an amino acid sequence having sequence identity to SEQ ID NO: 11627, wherein said polypeptide includes an amino acid sequence selected from the group consisting of PCSFG (SEQ ID NO: 11628) and PCAFG (SEQ ID NO: 11629). The invention includes a fragment of a polypeptide comprising SEQ ID NO: 11627, wherein said fragment includes an amino acid sequence selected from the group consisting of PCSFG (SEQ ID NO: 11628) and PCAFG (SEQ ID NO: 11629).

[0519] The SARS virus may contain polymorphism at valine residue Val-68 in SEQ ID NO: 11630 (Chi-PEP8). The invention includes a polypeptide comprising an amino acid sequence having sequence identity to SEQ ID NO: 11630, wherein said polypeptide includes an amino acid sequence selected from the group consisting of LAVVY (SEQ ID NO: 11631) and LAAVY (SEQ ID NO: 11632). The invention includes a fragment of a polypeptide comprising SEQ ID NO: 11630, wherein said fragment includes an amino acid sequence selected from the group consisting of LAVVY (SEQ ID NO: 11631) and LAAVY (SEQ ID NO: 11632).

[0520] The SARS virus may contain polymorphism at isoleucine residue Ile-50 in SEQ ID NO: 11633 (Chi-PEP13). The invention includes a polypeptide comprising an amino acid sequence having sequence identity to SEQ ID NO: 11633, wherein said polypeptide includes an amino acid sequence selected from the group consisting of NNIAS (SEQ ID NO: 11634) and NNTAS (SEQ ID NO: 11635). The invention includes a fragment of a polypeptide comprising SEQ ID NO: 11633, wherein said fragment includes an amino acid sequence selected from the group consisting of NNIAS (SEQ ID NO: 11634) and NNTAS (SEQ ID NO: 11635).

[0521] The SARS virus may contain a polymorphism at Serine residue Ser-943 in SEQ ID NO: 11636. The invention includes a polypeptide comprising an amino acid sequence having sequence identity to SEQ ID NO: 11636, wherein said polypeptide includes an amino acid sequence selected from the group consisting of AVSAC (SEQ ID NO: 11637) and AVGAC (SEQ ID NO: 11638). The invention includes a fragment of a polypeptide comprising SEQ ID NO: 11636, wherein said fragment includes an amino acid seuence selected from the group consisting of AVSAC (SEQ ID NO: 11637) and AVGAC (SEQ ID NO: 11638).

[0522] The invention includes a polynucleotide SEQ ID NO: 11639, or a fragment thereof or a sequence having sequence identity thereto. The invention includes a polypeptide encoded by the polynucleotide sequence set forth in SEQ ID NO: 11639, or a fragment thereof or a polypeptide sequence having sequence identity thereto.

[0523] The invention includes a polynucleotide set forth in SEQ ID NO: 11640, or a fragment thereof or a sequence having sequence identity thereto. The invention includes a polypeptide encoded by the polynucleotide sequence set forth in SEQ ID NO: 11640, or a fragment thereof or a polypeptide sequence having sequence identity thereto.

[0524] The invention includes each of the polynucleotides identified above. The invention includes each of the polynucleotides set forth in the sequence listing. The invention further includes polynucleotides having sequence identity to each of the polynucleotides identified above. The degree of sequence identity is preferably greater than 50% (e.g., 60%, 61%, 62%, 63%, 64%, 65%, 66%, 67%, 68%, 69%, 70%, 71%, 72%, 73%, 74%, 75%, 76%, 77%, 78%, 79%, 80%, 81%, 82%, 83%, 84%, 85%, 86%, 87%, 88%, 89%, 90%, 91%, 92%, 93%, 94%, 95%, 96%, 97%, 98%, 99% or more).

[0525] The invention includes polynucleotide sequences comprising fragments of each of the polynucleotide sequences identified above. The fragments should comprise at least n consecutive polynucleotides from a particular SEQ ID NO:, and, depending on the sequence, n is 7 or more (e.g., 7, 8, 9, 10, 11, 12, 13, 14, 15, 16, 17, 18, 19, 20, 21, 22, 23, 24, 25, 26, 27, 28, 29, 30, 31, 32, 33, 34, 35, 36, 37, 38, 39, 40, 45, 50, 55, 60, 65, 70, 80, 90, 100, 120, 130, 140, 150, 160, 170, 180, 190, 200, 210, 220, 230, 240, 250, 260, 270, 280, 290, 300 or more).

[0526] The invention includes each of the amino acid sequences encoded by each of the polynucleotide sequences identified above. The invention includes each of the amino acid sequences encoded by each of the polynucleotide sequences set forth in the sequence listing. The invention further includes amino acid sequences having sequence identity to the amino acid sequences encoded by each of the polynucleotide sequences identified above. The degree of sequence identity is preferably greater than 50% (e.g., 60%, 61%, 62%, 63%, 64%, 65%, 66%, 67%, 68%, 69%, 70%, 71%, 72%, 73%, 74%, 75%, 76%, 77%, 78%, 79%, 80%, 81%, 82%, 83%, 84%, 85%, 86%, 87%, 88%, 89%, 90%, 91%, 92%, 93%, 94%, 95%, 96%, 97%, 98%, 99% or more). The invention further includes fragments of amino acid sequences encoded by each of the polynucleotide sequences identified above. The fragments should comprise at least n consecutive amino acids from a particular SEQ ID NO:, and, depending on the sequence, n is 7 or more (e.g., 7, 8, 9, 10, 11, 12, 13, 14, 15, 16, 17, 18, 19, 20, 21, 22, 23, 24, 25, 26, 27, 28, 29, 30, 31, 32, 33, 34, 35, 36, 37, 38, 39, 40, 45, 50, 55, 60, 65, 70, 80, 90, 100, 120, 130, 140, 150, 160, 170, 180, 190, 200, 210, 220, 230, 240, 250, 260, 270, 280, 290, 300 or more).

[0527] The invention includes each of the amino acid sequences identified above. The invention includes each of the amino acid sequence set forth in the sequence listing. The invention further includes amino acid sequences having sequence identity to each of the amino acid sequences identified above. The degree of sequence identity is preferably greater than 50% (e.g., 60%, 61%, 62%, 63%, 64%, 65%, 66%, 67%, 68%, 69%, 70%, 71%, 72%, 73%, 74%, 75%, 76%, 77%, 78%, 79%, 80%, 81%, 82%, 83%, 84%, 85%, 86%, 87%, 88%, 89%, 90%, 91%, 92%, 93%, 94%, 95%, 96%, 97%, 98%, 99% or more).

[0528] The invention further includes fragments of the amino acid sequences identified above. The fragments should comprise at least n consecutive amino acids from a particular SEQ ID NO:, and, depending on the sequence, n is 7 or more (e.g., 7, 8, 9, 10, 11, 12, 13, 14, 15, 16, 17, 18, 19, 20, 21, 22, 23, 24, 25, 26, 27, 28, 29, 30, 31, 32, 33, 34, 35, 36, 37, 38, 39, 40, 45, 50, 55, 60, 65, 70, 80, 90, 100, 120, 130, 140, 150, 160, 170, 180, 190, 200, 210, 220, 230, 240, 250, 260, 270, 280, 290, 300 or more).

[0529] The invention includes polynucleotides encoding each of the amino acid sequences identified above. The invention includes polynucleotides encoding each of the amino acid sequences set forth in the sequence listing. The invention further includes polynucleotides having sequence identity with each of the polynucleotides encoding each of the amino acid sequences identified above. The degree of sequence identity is preferably greater than 50% (e.g., 60%, 61%, 62%, 63%, 64%, 65%, 66%, 67%, 68%, 69%, 70%, 71%, 72%, 73%, 74%, 75%, 76%, 77%, 78%, 79%, 80%, 81%, 82%, 83%, 84%, 85%, 86%, 87%, 88%, 89%, 90%, 91%, 92%, 93%, 94%, 95%, 96%, 97%, 98%, 99% or more).

[0530] The invention further includes fragments of polynucleotides encoding each of the amino acid sequences identified above. The fragments should comprise at least n consecutive polynucleotides from a particular SEQ ID NO:, and, depending on the sequence, n is 7 or more (e.g., 7, 8, 9, 10, 11, 12, 13, 14, 15, 16, 17, 18, 19, 20, 21, 22, 23, 24, 25, 26, 27, 28, 29, 30, 31, 32, 33, 34, 35, 36, 37, 38, 39, 40, 45, 50, 55, 60, 65, 70, 80, 90, 100, 120, 130, 140, 150, 160, 170, 180, 190, 200, 210, 220, 230, 240, 250, 260, 270, 280, 290, 300 or more).

[0531] As described in more detail below, polynucleotides for use as primers and/or as probes may contain at least 4 or 8 contiguous nucleotides from a polynucleotide sequence of the invention e.g. at least 14, 15, 16, 17, 18, 19, 20, 21, 22, 23, 24, 25, 26, 27, 28, 29, or 30 contiguous nucleotides and up to about 50, 75, 100, 200 contiguous nucleotides or more. While 6-8 nucleotides may be a workable length, sequences of 10-12 nucleotides are preferred, and about 13, 14, 15, 16, 17, 18, 19, 20, or 21 or more nucleotides or more appears optimal for hybridisation.

[0532] In one embodiment, the invention is directed to polynucleotides and amino acid sequences that do not consist entirely of a known SARS virus polynucleotide or amino acid sequence or of a known coronavirus polynucleotide or amino acid sequence. In one embodiment, the polynucleotides and amino acid sequences of the invention do not consist entirely of the sequence SEQ ID NO: 1. In another embodiment, the polynucleotides and amino acid sequences of the invention do not consist entirely of the sequence SEQ ID NO: 2. SEQ ID NO: 9967 is a SARS genome sequence of the Frankfurt (FRA) isolate (GenBank: AY310120). Compared to SEQ ID NO: 1, it differs at nucleotides 2546, 2590, 11437, 18954, 19073, 20585, 20899, 23209, 24922, 26589 & 28257; compared to SEQ ID NO:2, it differs at nucleotides 2560, 7922, 11451, 16625, 18968 & 19067. Further genome sequences have become available from GenBank, since this application was originally filed, under accession numbers including AY559097, AY559096, AY559095, AY559094, AY559093, AY559092, AY559091, AY559090, AY559089, AY559088, AY559087, AY559086, AY559085, AY559084, AY559083, AY559082, AY559081, AY274119, AY323977, AY291315, AY502932, AY502931, AY502930, AY502929, AY502928, AY502927, AY502926, AY502925, AY502924, AY502923, AY291451, AY390556, AY395003, AY395002, AY395001, AY395000, AY394999, AY394998, AY394997, AY394996, AY394995, AY394994, AY394993, AY394992, AY394991, AY394990, AY394989, AY394987, AY394986, AY394985, AY394983, AY394979, AY394978, AY508724, AY394850, AY463059, AY463060, AY313906, AY310120, AY461660, AY485278, AY485277, AY345988, AY345987, AY345986, AY282752, AY357076, AY357075, AY350750, AY304495, AY304488, AY304486, AY427439, AY283798, AY278491, AY278489, AY362699, AY362698, AY283797, AY283796, AY283795, AY283794, AY278741, AY351680, AP006561, AP006560, AP006559, AP006558, AP006557, AY278554, AY348314, AY338175, AY338174, AY321118, AY279354, AY278490, AY278487, AY297028, AY278488, and ND_{—}004718.

[0533] In another embodiment, the invention is directed to polynucleotides that encode proteins which are not immunologically cross reactive with a protein of a mouse hepatitis virus, a bovine coronavirus or an avian infectious bronchitis virus. In another embodiment, the invention is directed to proteins which are not immunologically cross reactive with a protein of a mouse hepatitis virus, a bovine coronavirus or an avian infectious bronchitis virus.

[0534] Each of the polynucleotides identified above may be used to encode a portion of a fusion protein. Accordingly, the invention compries one or more of the polynucleotides identified above wherein the polynucleotides encoding for the start codon are removed. The invention further comprises one or more of the amino acids identified above wherein the starting methionine is removed.

[0535] Any of the polynucleotide or amino acid sequences discussed above may be used in vaccines for the treatment or prevention of SARS virus infection, including as a SARS viral antigen. Additionally, any of the polynucleotides or amino acid sequences discussed above may be used as diagnostic reagents, or in kits (comprising such reagents) or in methods used to diagnose or identify the presence or absence of a SARS virus in a biological sample.

[0536] SARS viral antigens of the invention may include a polypeptide with 99%, 95%, 90%, 85%, or 80% homology to one or more of the group consisting of the following proteins: nonstructural protein 2 (NS2); hemagglutinin-esterase glycoprotein (HE) (also referred to as E3), spike glycoprotein (S) (also referred to as E2), nonstructural region 4 (NS4), envelope (small membrane) protein (E) (also referred to as sM), membrane glycoprotein (M) (also referred to as E1), nucleocapsid phosphoprotein (N) or RNA dependent RNA polymerase (pol).

[0537] A detailed discussion of Coroavirus biology can be found in Fields Virology (2nd ed), Fields et al. (eds.), B.N. Raven Press, New York, N.Y., Chapter 35.

[0538] Another example of a SARS virus isolate is set forth in Example 1 below. The invention includes each of the polypeptide and polynucleotide sequences identified in Example 1. In addition, the invention includes vaccine formulations comprising one or more of the polypeptide or polynucleotide sequences identified in Example 1. The invention includes diagnostic regaents, kits (comprising such reagents) and methods which can be used to diagnose or identify the presence or absence of a SARS virus in a biological sample using one or more of the polypeptide or polynucleotide sequences identified in Example 1. The invention includes methods for the treatment or prevention of SARS virus infection utilizing small molecule viral inhibitors and combinations of small molecule viral inhibitors and kits for the treatment of SARS. The small molecule inhibitors may specifically target one or more of the polypeptides or polynucleotides identified in Example 1.

[0539] Further discussion of terms used in the application follows below.

[0540] “Respiratory Virus” as used herein refers to a virus capable of infecting the human respiratory tract. Respiratory Viral Antigens suitable for use in the invention include Severe Acute Respiratory Syndrome virus, coronavirus, influenza virus, human rhinovirus (HRV), parainfluenza virus (PWV), respiratory syncytial virus (RSV), adenovirus, metapneumovirus, and rhinovirus.

[0541] The terms “polypeptide”, “protein” and “amino acid sequence” as used herein generally refer to a polymer of amino acid residues and are not limited to a minimum length of the product. Thus, peptides, oligopeptides, dimers, mulimers, and the like, are included within the definition. Both full-length proteins and fragments thereof are encompassed by the definition. Minimum fragments of polypeptides useful in the invention can be at least 3, 4, 5, 6, 7, 8, 9, 10, 11, 12, 13, 14, or even 15 amino acids. Typically, polypeptides useful in this invention can have a maximum length suitable for the intended application. Generally, the maximum length is not critical and can easily be selected by one skilled in the art.

[0542] Polypeptides of the invention can be prepared in many ways e.g. by chemical synthesis (at least in part), by digesting longer polypeptides using proteases, by translation from RNA, by purification from cell culture (e.g. from recombinant expression), from the organism itself (e.g. after viral culture, or direct from patients), from a cell line source etc. A preferred method for production of peptides <40 amino acids long involves in vitro chemical synthesis (Bodanszky (1993) Principles of Peptide Synthesis (ISBN: 0387564314); Fields et al. (1997) Methods in Enzymology 289: Solid-Phase Peptide Synthesis. ISBN: 0121821900). Solid-phase peptide synthesis is particularly preferred, such as methods based on t-Boc or Fmoc (Chan & White (2000) Fmoc Solid Phase Peptide Synthesis ISBN: 0199637245) chemistry. Enzymatic synthesis (Kullmann (1987) Enzymatic Peptide Synthesis. ISBN: 0849368413) may also be used in part or in full. As an alternative to chemical synthesis, biological synthesis may be used e.g. the polypeptides may be produced by translation. This may be carried out in vitro or in vivo. Biological methods are in general restricted to the production of polypeptides based on L-amino acids, but manipulation of translation machinery (e.g. of aminoacyl tRNA molecules) can be used to allow the introduction of D-amino acids (or of other non natural amino acids, such as iodotyrosine or methylphenylalanine, azidohomoalanine, etc.) (Ibba (1996) Biotechnol Genet Eng Rev 13:197-216.). Where D-amino acids are included, however, it is preferred to use chemical synthesis. Polypeptides of the invention may have covalent modifications at the C-terminus and/or N-terminus, particularly where they are for in vivo administration e.g by attachment of acetyl or carboxamide, as in the Fuzeon™ product.

[0543] Reference to polypeptides and the like also includes derivatives of the amino acid sequences of the invention. Such derivatives can include postexpression modifications of the polypeptide, for example, glycosylation, acetylation, phosphorylation, and the like. Amino acid derivatives can also include modifications to the native sequence, such as deletions, additions and substitutions (generally conservative in nature), so long as the protein maintains the desired activity. These modifications may be deliberate, as through site-directed mutagenesis, or may be accidental, such as through mutations of.hosts which produce the proteins or errors due to PCR amplification. Furthermore, modifications may be made that have one or more of the following effects: reducing toxicity; facilitating cell processing (e.g., secretion, antigen presentation, etc.); and facilitating presentation to B-cells and/or T-cells.

[0544] “Fragment” or “Portion” as used herein refers to a polypeptide consisting of only a part of the intact full-length polypeptide sequence and structure as found in nature. For instance, a fragment can include a C-terminal deletion and/or an N-terminal deletion of a protein.

[0545] A “recombinant” protein is a protein which has been prepared by recombinant DNA techniques as described herein. In general, the gene of interest is cloned and then expressed in transformed organisms, as described further below. The host organism expressed the foreign gene to produce the protein under expression conditions.

[0546] The term “polynucleotide”, as known in the art, generally refers to a nucleic acid molecule. A “polynucleotide” can include both double- and single-stranded sequences and refers to, but is not limited to, cDNA from viral, prokaryotic or eukaryotic mRNA, genomic RNA and DNA sequences from viral (e.g. RNA and DNA viruses and retroviruses) or prokaryotic DNA, and especially synthetic DNA sequences. The term also captures sequences that include any of the known base analogs of DNA and RNA, and includes modifications such as deletions, additions and substitutions (generally conservative in nature), to the native sequence, so long as the nucleic acid molecule encodes a therapeutic or antigenic protein. These modifications may be deliberate, as through site-directed mutagenesis, or may be accidental, such as through mutations of hosts that produce the antigens. Modifications of polynucleotides may have any number of effects including, for example, facilitating expression of the polypeptide product in a host cell.

[0547] Polynucleotides of the invention may be prepared in many ways e.g. by chemical synthesis (e.g. phosphoramidite synthesis of DNA) in whole or in part, by digesting longer nucleic acids using nucleases (e.g. restriction enzymes), by joining shorter nucleic acids or nucleotides (e.g. using ligases or polymerases), from genomic or cDNA libraries, etc.

[0548] A polynucleotide can encode a biologically active (e.g., immunogenic or therapeutic) protein or polypeptide. Depending on the nature of the polypeptide encoded by the polynucleotide, a polynucleotide can include as little as 10 nucleotides, e.g., where the polynucleotide encodes an antigen.

[0549] By “isolated” is meant, when referring to a polynucleotide or a polypeptide, that the indicated molecule is separate and discrete from the whole organism with which the molecule is found in nature or, when the polynucleotide or polypeptide is not found in nature, is sufficiently free of other biological macromolecules so that the polynucleotide or polypeptide can be used for its intended purpose. The polynucleotides and polypeptides of the invention are preferably isolated polynucleotides and isolated polypeptides.

[0550] “Antibody” as known in the art includes one or more biological moieties that, through chemical or physical means, can bind to or associate with an epitope of a polypeptide of interest. The antibodies of the invention include antibodies which specifically bind to a SARS viral antigen. The term “antibody” includes antibodies obtained from both polyclonal and monoclonal preparations, as well as the following: hybrid (chimeric) antibody molecules (see, for example, Winter et al. (1991) Nature 349: 293-299; and U.S. Pat. No. 4,816,567; F(ab′)₂ and F(ab) fragments; Fᵥ molecules (non-covalent heterodimers, see, for example, Inbar et al. (1972) Proc Natl Acad Sci USA 69:2659-2662; and Ehrlich et al. (1980) Biochem 19:4091-4096); single-chain Fv molecules (sFv) (see, for example, Huston et al. (1988) Proc Natl Acad Sci USA 85:5897-5883); dimeric and trimeric antibody fragment constructs; minibodies (see, e.g., Pack et al. (1992) Biochem 31:1579-1584; Cumber et al. (1992) J Immunology 149B: 120-126); humanized antibody molecules (see, for example, Riechmann et al. (1988) Nature 332:323-327; Verhoeyan et al. (1988) Science 239:1534-1536; and U.K. Patent Publication No. GB 2,276,169, published 21 Sep. 1994); and, any functional fragments obtained from such molecules, wherein such fragments retain immunological binding properties of the parent antibody molecule. The term “antibody” further includes antibodies obtained through non-conventional processes, such as phage display.

[0551] As used herein, the term “monoclonal antibody” refers to an antibody composition having a homogeneous antibody population. The term is not limited regarding the species or source of the antibody, nor is it intended to be limited by the manner in which it is made. Thus, the term encompasses antibodies obtained from murine hybridomas, as well as human monoclonal antibodies obtained using human rather than murine hybridomas. See, e.g., Cote, et al. Monoclonal Antibodies and Cancer Therapy, Alan R. Liss, 1985, p 77.

[0552] An “immunogenic composition” as used herein refers to a composition that comprises an antigenic molecule where administration of the composition to a subject results in the development in the subject of a humoral and/or a cellular immune response to the antigenic molecule of interest. The immunogenic composition can be introduced directly into a recipient subject, such as by injection, inhalation, oral, intranasal or any other parenteral, mucosal or transdermal (e.g., intra-rectally or intra-vaginally) route of administration.

[0553] The term “derived from” is used to identify the source of molecule (e.g., a molecule can be derived from a polynucleotide, polypeptide, an immortalized cell line can be derived from any tissue, etc.). A first polynucleotide is “derived from” a second polynucleotide if it has the same or substantially the same basepair sequence as a region of the second polynucleotide, its cDNA, complements thereof, or if it displays sequence identity as described above. Thus, a first polynucleotide sequence is “derived from” a second sequence if it has (i) the same or substantially the same sequence as the second sequence or (ii) displays sequence identity to polypeptides of that sequence.

[0554] A first polypeptide is “derived from” a second polypeptide if it is (i) encoded by a first polynucleotide derived from a second polynucleotide, or (ii) displays sequence identity to the second polypeptides as described above. Thus, a polypeptide (protein) is “derived from” a particular SARS virus if it is (i) encoded by an open reading frame of a polynucleotide of that SARS virus, or (ii) displays sequence identity, as described above, to polypeptides of that SARS virus.

[0555] Both polynucleotide and polypeptide molecules can be physically derived from a SARS virus or produced recombinantly or synthetically, for example, based on known sequences.

[0556] A cultured cell or cell line is “derived from” another cell, cells or tissue if it is originally obtained from existing cells or tissue. Non-limiting examples of tissue that cells may be derived from include skin, retina, liver, kidney, heart, brain, muscle, intestinal, ovary, breast, prostate, cancerous tissue, tissue infected with one or more pathogens (e.g., viruses, bacteria etc.) and the like. The cells described herein may also be derived from other cells including, but not limited to, primary cultures, existing immortalized cells line and/or other isolated cells.

[0557] An “antigen” refers to a molecule containing one or more epitopes (either linear, conformational or both) that will stimulate a host's immune system to make a humoral and/or cellular antigen-specific response. The term is used interchangeably with the term “immunogen.” Normally, an epitope will include between about 3-15, generally about 5-15 amino acids. A B-cell epitope is normally about 5 amino acids but can be as small as 3-4 amino acids. A T-cell epitope, such as a CTL epitope, will include at least about 7-9 amino acids, and a helper T-cell epitope at least about 12-20 amino acids. Normally, an epitope will include between about 7 and 15 amino acids, such as, 9, 10, 12 or 15 amino acids. The term “antigen” denotes both subunit antigens, (i.e., antigens which are separate and discrete from a whole organism with which the antigen is associated in nature), as well as, killed, attenuated or inactivated bacteria, viruses, fungi, parasites or other microbes as well as tumor antigens, including extracellular domains of cell surface receptors and intracellular portions that may contain T-cell epitopes. Antibodies such as anti-idiotype antibodies, or fragments thereof, and synthetic peptide mimotopes, which can mimic an antigen or antigenic determinant, are also captured under the definition of antigen as used herein. Similarly, an oligonucleotide or polynucleotide that expresses an antigen or antigenic determinant in vivo, such as in gene therapy and DNA immunization applications, is also included in the definition of antigen herein.

[0558] An “immunological response” to an antigen or composition is the development in a subject of a humoral and/or a cellular immune response to an antigen present in the composition of interest. For purposes of the present invention, a “humoral immune response” refers to an immune response mediated by antibody molecules, including secretory (IgA) or IgG molecules, while a “cellular immune response” is one mediated by T-lymphocytes and/or other white blood cells. One important aspect of cellular immunity involves an antigen-specific response by cytolytic T-cells (“CTL”s). CTLs have specificity for peptide antigens that are presented in association with proteins encoded by the major histocompatibility complex (MHC) and expressed on the surfaces of cells. CTLs help induce and promote the destruction of intracellular microbes, or the lysis of cells infected with such microbes. Another aspect of cellular immunity involves an antigen-specific response by helper T-cells. Helper T-cells act to help stimulate the function, and focus the activity of, nonspecific effector cells against cells displaying peptide antigens in association with MHC molecules on their surface. A “cellular immune response” also refers to the production of cytokines, chemokines and other such molecules produced by activated T-cells and/or other white blood cells, including those derived from CD4+ and CD8+ T-cells. In addition, a chemokine response may be induced by various white blood or endothelial cells in response to an administered antigen.

II. Vaccine Formulations

[0559] The invention relates to vaccine formulations for the treatment or prevention of Severe Acute Respiratory Syndrome (SARS). Vaccine formulations of the invention include an inactivated (or killed) SARS virus, an attenuated SARS virus, a split SARS virus preparation and a recombinant or purified subunit formulation of one or more SARS viral antigens. The invention includes polypeptides and polynucleotides encoding for SARS viral antigens and immunogenic fragments thereof. Expression and delivery of the polynucleotides of the invention may be facilitated via viral vectors and/or viral particles, including Virus Like Particles (VLPs).

A. Inactivated (or Killed) SARS Vaccines

[0560] The invention includes a composition comprising an inactivated (or killed) SARS virus and methods for the production thereof. Inactivated SARS viral compositions can be used as prophylactic or therapeutic SARS virus vaccine. Preferably the inactivated SARS virus vaccine composition comprises an amount of inactivated SARS virus which, before inactivation, is equivalent to a virus titer of from about 4 to 7 logs plaque forming units (PFU) or 4 to 7 logs tissue culture infectious dose 50 (TCID₅₀) per milliliter. More preferably, before inactivation the virus titer is from 4 to 11, 7 to 11 or 9 to 11 PFU or TCID₅₀. Still more preferably the inactivated SARS virus vaccine composition comprises an amount of inactivated SARS virus which, before inactivation, is equivalent to a virus titer of from about 5 to 9 PFU or 5 to 9 TCID₅₀ per milliliter. In one embodiment, the PFU or TCID₅₀ of the cultured SARS virus at harvest is 6 to 8, more preferably about 7.5 PFU or TCID₅₀ per milliliter. Upon concentration of the viral harvest, the PFU or TCID₅₀ is preferably 8 to 11, still more preferably about 9 PFU or TCID₅₀ per milliliter. The vaccine composition comprises a sufficient amount of the SARS virus antigen to produce an immunological response in a primate.

[0561] Methods of inactivating or killing viruses are known in the art to destroy the ability of the viruses to infect mammalian cells. Such methods include both chemical or physical means. Chemical means for inactivating a SARS virus include treatment of the virus with an effective amount of one or more of the following agents: detergents, formaldehyde, formalin, β-propiolactone, or UV light. Additional chemical means for inactivation include treatment with methylene blue, psoralen, carboxyfullerene (C60) or a combination of any thereof. Other methods of viral inactivation are known in the art, such as for example binary ethylamine, acetyl ethyleneimine, or gamma irradiation.

[0562] For example formaldehyde may be used at concentrations such as 0.1 to 0.02%, preferably at 0.02 to 0.1%, and still more preferably at 0.04 to 0.05%. The inactivating agent is added to virus containing culture supernatants, prior to or after harvesting said culture supernatants from vessels used for virus propagation, either with or without a step of cell disruption for release of cell-associated virus prior to harvesting. Further, the inactivating agent may be added after said culture supernatants have been stored frozen and thawed, or after one or more steps of purification to remove cell contaminants. Preferably, however, formaldehyde is added after removal of cells and cellular debris or after one or more purification steps. After addition of formaldehyde, the virus containing mixture is transferred into an incubation vessel and incubated at refrigeration temperatures (e.g. +2 to 8° C.) or alternatively at elevated temperatures, such as ambient temperatures between approximately 20 and 30° C. or at 33° C. to 37° C. for a period of 12 hours to 7 days, whereby the temperature chosen should be adjusted to the duration of incubation. Prefered conditions are e.g. +2-8° C. for 3-7 days (prefered are 3-7days), ambient temperatures and incubation for 16 hours to 3 days (prefered 24-48 hours), or 35-37° C. for 12-36 hours. If it is desirable to remove excess formalin, sodium thiosulfate or sodium metabisulfite at equimolar or 1.5-fold molar concentration (relative to formaldehyde) may be added after completing the inactivation process.

[0563] For example, β-propiolactone may be used at concentrations such as 0.01 to 0.5%, preferably at 0.5% to 0.2%, and still more preferably at 0.025 to 0.1%. The inactivating agent is added to virus containing culture supernatants (virus material) prior to or after harvesting said culture supernatants from vessels used for virus propagation, either with or without a step of cell disruption for release of cell-associated virus prior to harvesting. Further, the inactivating agent may be added after said culture supernatants have been stored frozen and thawed, or after one or more steps of purification to remove cell contaminants. β-propiolactone is added to the virus material, with the adverse shift in pH to acidity being controlled with sodium hydroxide (e.g., 1 N NaOH), a Tris-buffer or sodium bicarbonate solution. After transfering the mixture to another inactivation vessel, the combined inactivating agent-virus materials are incubated at temperatures from 4° C. to 37° C., for incubation times of preferably 24 to 72 hours.

[0564] Another inactivant which may be used is binary ethyleneimine (BEI). Equal volumes of a 0.2 molar bromoethylamine hydrobromide solution and a 0.4 molar sodium hydroxide solution are mixed and incubated at about 37° C. for 60 minutes. The resulting cyclized inactivant is binary ethyleneimine, which is added to the virus materials at 0.5 to 4 percent, and preferably at 1 to 3 percent, volume to volume. The inactivating virus materials are held from about 4° C. to 37° C. for 24 to 72 hours with periodic agitation. At the end of this incubation 20 ml. of a sterile 1 molar sodium thiosulfate solution was added to insure neutralization of the BEI.

[0565] In one embodiment, the invention includes an inactivating method is designed to maximize exposure of the virus to the inactivating agent and to minimize long-term exposure of the temperature sensitive SARS virus particles to elevated temperatures. The invention includes an inactivation method comprising exposing the virus to the inactivation agent (such as BPL) for 12 to 24 hours at refrigeration temperatures followed by hydrolysis of any residual inactivating agent by elevating the temperature for only 3 hours. Preferably, the refrigeration temperatures are between 0 and 8° C., more preferably around 4° C. Preferably, the elevated temperature is between 33 and 41° C., more preferably around 37° C. As assessed by a test for residual infectious virus using 10 ml aliquots of the inactivated preparation, the method is able to inactivate SARS-CoV in raw cell culture harvests below a theoretical limit of 0.03 infectious units/ml.

[0566] Diluted and undiluted samples of the inactivated virus materials are added to susceptible cell (tissue) culture (e.g., VERO) to detect any non-inactivated virus. The cultured cells are passaged multiple times and examined for the presence of SARS virus based on any of a variety of methods, such as, for example, cytopathic effect (CPE) and antigen detection (e.g., via fluoroscent antibody conjugates specific for SARS virus). Such tests allow determination of complete virus inactivation.

[0567] Prior to inactivation, the SARS virus will be cultured in a mammalian cell culture. The cell culture may be adherently growing cells or cells growing in suspension. Preferably the cells are of mammalian origin, but may also be derived from avian (e.g., hens' cells such as hens' embryo cells (CEF cells)), amphibian, reptile, insect, or fish sources. Mammalian sources of cells include, but are not limited to, human or non-human primate (e.g., MRC-5 (ATCC CCL-171), WI-38 (ATCC CCL-75), HeLa cells, human diploid cells, fetal rhesus lung cells (e.g. ATCC CL-160), human embryonic kidney cells (293 cells, typically transformed by sheared adenovirus type 5 DNA), VERO cells (e.g., from monkey kidneys), horse, cow (e.g., MDBK cells), sheep, dog (e.g., MDCK cells from dog kidneys, ATCC CCL34 MDCK (NBL2) or MDCK 33016, deposit number DSM ACC 2219 as described in WO 97/37001), cat, and rodent (e.g., hamster cells such as BHK21-F, HKCC cells, or Chinese hamster ovary cells (CHO cells)), and may be obtained from a wide variety of developmental stages, including for example, adult, neonatal, fetal, and embryo.

[0568] In certain embodiments the cells are immortalized (e.g., PERC.6 cells are described, for example, in WO 01/38362 and WO 02/40665, incorporated by reference herein in their entireties, as well as deposited under ECACC deposit number 96022940), or any other cell type immortalized using the techniques described herein.

[0569] In preferred embodiments, mammalian cells are utilized, and may be selected from and/or derived from one or more of the following non-limiting cell types: fibroblast cells (e.g., dermal, lung), endothelial cells (e.g., aortic, coronary, pulmonary, vascular, dermal microvascular, umbilical), hepatocytes, keratinocytes, immune cells (e.g., T cell, B cell, macrophage, NK, dendritic), mammary cells (e.g., epithelial), smooth muscle cells (e.g., vascular, aortic, coronary, arterial, uterine, bronchial, cervical, retinal pericytes), melanocytes, neural cells (e.g., astrocytes), prostate cells (e.g., epithelial, smooth muscle), renal cells (e.g., epithelial, mesangial, proximal tubule), skeletal cells (e.g., chondrocyte, osteoclast, osteoblast), muscle cells (e.g., myoblast, skeletal, smooth, bronchial), liver cells, retinoblasts, and stromal cells. WO 97/37000 and WO 97/37001, incorporated by reference herein in their entireties, describe production of animal cells and cell lines that capable of growth in suspension and in serum free media and are useful in the production and replication of viruses.

[0570] Preferably, the SARS viruses of the invention are grown on VERO cells or fetal rhesus kidney cells.

[0571] Culture conditions for the above cell types are well-described in a variety of publications, or alternatively culture medium, supplements, and conditions may be purchased commercially, such as for example, as described in the catalog and additional literature of Cambrex Bioproducts (East Rutherford, N.J.).

[0572] In certain embodiments, the host cells used in the methods described herein are cultured in serum free and/or protein free media. A medium is referred to as a serum-free medium in the context of the present invention in which there are no additives from serum of human or animal origin. Protein-free is understood to mean cultures in which multiplication of the cells occurs with exclusion of proteins, growth factors, other protein additives and non-serum proteins. The cells growing in such cultures naturally contain proteins themselves.

[0573] Known serum-free media include Iscove's medium, Ultra-CHO medium (BioWhittaker) or EX-CELL (JRH Bioscience). Ordinary serum-containing media include Eagle's Basal Medium (BME) or Minimum Essential Medium (MEM) (Eagle, Science, 130, 432 (1959)) or Dulbecco's Modified Eagle Medium (DMEM or EDM), which are ordinarily used with up to 10% fetal calf serum or similar additives. Optionally, Minimum Essential Medium (MEM) (Eagle, Science, 130, 432 (1959)) or Dulbecco's Modified Eagle Medium (DMEM or EDM) may be used without any serum containing supplement. Protein-free media like PF-CHO (JHR Bioscience), chemically-defined media like ProCHO 4CDM (BioWhittaker) or SMIF 7 (Gibco/BRL Life Technologies) and mitogenic peptides like Primactone, Pepticase or HyPep™ (all from Quest International) or lactalbumin hydrolyzate (Gibco and other manufacturers) are also adequately known in the prior art. The media additives based on plant hydrolyzates have the special advantage that contamination with viruses, mycoplasma or unknown infectious agents can be ruled out.

[0574] The cell culture conditions to be used for the desired application (temperature, cell density, pH value, etc.) are variable over a very wide range owing to the suitability of the cell line employed according to the invention and can be adapted to the requirements of the SARS virus.

[0575] The method for propagating the SARS virus in cultured cells (e.g., mammalian cells) includes the steps of inoculating the cultured cells with SARS virus, cultivating the infected cells for a desired time period for virus propagation, such as for example as determined by SARS virus titer or SARS virus antigen expression (e.g., between 24 and 168 hours after inoculation) and collecting the propagated virus. The cultured cells are inoculated with a SARS virus (measured by PFU or TCID₅₀) to cell ratio of 1:10000 to 1:10. A lower range of ratios may also be used e.g. 1:500 to 1:1, preferably 1:100 to 1:5, more preferably 1:50 to 1:10. The SARS virus is added to a suspension of the cells or is applied to a monolayer of the cells, and the virus is absorbed on the cells for at least 60 minutes but usually less than 300 minutes, preferably between 90 and 240 minutes at 25° C to 40° C., more preferably 28° C. to 37° C., still more preferably at about 33° C. The infected cell culture (e.g., monolayers) may be treated either by freeze-thawing or by enzymatic action to increase the viral content of the harvested culture supernatants. The harvested fluids are then either inactivated or stored frozen.

[0576] A comparison of SARS infected Vero cells grown with and without fetal calf serum (“FCS”) is shown in FIG. 26A. Briefly, Vero cells were split the day before infection and cultivated in T175 flasks. Infection of 90% confluent Vero cell monolayers the following day was performed with a SARS-CoV seed stock (strain FRA, passage 4, Accession number AY310120), with or without 3% FCS (FIG. 26A). The addition of FCS to the cell media showed little impact on virus yield.

[0577] Cultured cells may be infected at a multiplicity of infection (“m.o.i.”) of about 0.0001 to 10, preferably 0.002 to 5, more preferably to 0.001 to 2. Still more preferably, the cells are infected at a m.o.i of about 0.01. A comparison of viral yield at varying m.o.i. levels is shown in FIG. 26B.

[0578] Infected cells may be harvested 30 to 60 hours post infection. Preferably, the cells are harvested 34-48 hours post infection. Still more preferably, the cells are harvested 38 to 40 hours post infection. See FIG. 26C.

[0579] Methods of purification of inactivated virus are known in the art and may include one or more of, for instance gradient centrifugation, ultracentrifugation, continuous-flow ultracentrifugation and chromatography, such as ion exchange chromatography, size exclusion chromatography, and liquid affinity chromatography. Additional method of purification include ultrafiltration and dialfiltration. See J P Gregersen “Herstellung von Virussimpfstoffen aus Zellkulturen” Chapter 4.2 in Pharmazeutische Biotecnology (eds. O. Kayser and R H Mueller) Wissenschaftliche Verlagsgesellschaft, Stuttgart, 2000. See also, O'Neil et al., “Virus Harvesting and Affinity Based Liquid Chromatography. A Method for Virus Concentration and Purification”, Biotechnology (1993) 11:173-177; Prior et al., “Process Development for Manufacture of Inactivated HIV-1”, Pharmaceutical Technology (1995) 30-52; and Majhdi et al., “Isolation and Characterization of a Coronavirus from Elk Calves with diarrhea” Journal of Clinical Microbiology (1995) 35(11): 2937-2942.

[0580] Other examples of purification methods suitable for use in the invention include polyethylene glycol or ammonium sulfate precipitation (see Trepanier et al., “Concentration of human respiratory syncytial virus using ammonium sulfate, polyethylene glycol or hollow fiber ultrafiltration” Journal of Virological Methods (1981) 3(4):201-211; Hagen et al., “Optimization of Poly(ethylene glycol) Precipitation of Hepatitis Virus Used to prepare VAQTA, a Highly Purified Inactivated Vaccine” Biotechnology Progress (1996) 12:406-412; and Carlsson et al., “Purification of Infectious Pancreatic Necrosis Virus by Anion Exchange Chromatography Increases the Specific Infectivity” Journal of Virological Methods (1994) 47:27-36) as well as ultrafiltration and microfiltration (see Pay et al., Developments in Biological Standardization (1985) 60:171-174; Tsurumi et al., “Structure and filtration performances of improved cuprammonium regenerated cellulose hollow fibre (improved BMM hollow fibre) for virus removal” Polymer Journal (1990) 22(12):1085-1100; and Makino et al., “Concentration of live retrovirus with a regenerated cellulose hollow fibre, BMM”, Archives of Virology (1994) 139(1-2):87-96.).

[0581] Preferably, the virus is purified using chromatography, such as ion exchange, chromatography. Chromatic purification allows for the production of large volumes of virus containing suspension. The viral product of interest can interact with the chromatic medium by a simple adsorption/desorption mechanism, and large volumes of sample can be processed in a single load. Contaminants which do not have affinity for the adsorbent pass through the column. The virus material can then be eluted in concentrated form.

[0582] Preferred anion exchange resins for use in the invention include DEAE, EMD TMAE. Preferred cation exchange resins may comprise a sulfonic acid-modified surface. In one embodiment, the virus is purified using ion exchange chromatography comprising a strong anion exchange resin (e.g. EMD TMAE) for the first step and EMD-SO₃ (cation exchange resin) for the second step. A metal-binding affinity chromatography step can optionally be included for further purification. (See, e.g., WO 97/06243).

[0583] A preferred resin for use in the invention is Fractogel™ EMD. This synthetic methacrylate based resin has long, linear polymer chains (so-called “tentacles”) covalently attached. This “tentacle chemistry” allows for a large amount of sterically accessible ligands for the binding of biomolecules without any steric hindrance. This resin also has improved pressure stability.

[0584] Column-based liquid affinity chromatography is another preferred purification method for use in the invention. One example of a resin for use in this purification method is Matrex™ Cellufine™ Sulfate (MCS). MCS consists of a rigid spherical (approx. 45-105 μm diameter) cellulose matrix of 3,000 Dalton exclusion limit (its pore structure excludes macromolecules), with a low concentration of sulfate ester functionality on the 6-position of cellulose. As the functional ligand (sulfate ester) is relatively highly dispersed, it presents insufficient cationic charge density to allow for most soluble proteins to adsorb onto the bead surface. Therefore the bulk of the protein found in typical virus pools (cell culture supernatants, e.g. pyrogens and most contaminating proteins, as well as nucleic acids and endotoxins) are washed from the column and a degree of purification of the bound virus is achieved.

[0585] The rigid, high-strength beads of MCS tend to resist compression. The pressure/flow characteristics the MCS resin permit high linear flow rates allowing high-speed processing, even in large columns, making it an easily scalable unit operation. In addition a chromatographic purification step with MCS provides increased assurance of safety and product sterility, avoiding excessive product handling and safety concerns. As endotoxins do not bind to it, the MCS purification step allows a rapid and contaminant free depyrogenation. Gentle binding and elution conditions provide high capacity and product yield. The MCS resin therefore represents a simple, rapid, effective, and cost-saving means for concentration, purification and depyrogenation. In addition, MCS resins can be reused repeatedly.

[0586] The inactivated virus may be further purified by gradient centrifugation, preferably density gradient centrifugation. For commercial scale operation a continuous flow sucrose gradient centrifugation would be the preferred option. This method is widely used to purify antiviral vaccines and is known to the expert in the field (See J P Gregersen “Herstellung von Virussimpfstoffen aus Zellkulturen” Chapter 4.2 in Pharmazeutische Biotechnology (eds. O. Kayser and R H Mueller) Wissenschaftliche Verlagsgesellschaft, Stuttgart, 2000.)

[0587] The density gradient centrifugation step may be performed using laboratory or commercial scale gradient centrifugation equipment. For example, a swinging bucket rotor, a fixed angle rotor, or a vertical tube rotor, particularly for laboratory scale production of the virus. Preferably, the gradient centrifugation step is performed using a swinging bucket rotor. This type of rotor has a sufficiently long pathlength to provide high quality separations, particularly with multicomponent samples. In addition, swinging bucket rotors have greatly reduced wall effects, and the contents do not reorient during acceleration and deceleration. Because of their longer pathlength, separations take longer compared to fixed angle or vertical tube rotors. The prepared sucrose solutions are controlled via refractometer on their sucrose concentration.

[0588] Sucrose gradients for density gradient centrifugation, such as in a swinging bucket centrifuge tubes may be formed prior to centrifugation by the use of a gradient former (continuous/linear). The volume of sample which can be applied to the gradient in a swinging bucket rotor tube is a function of the cross-sectional area of the gradient that is exposed to the sample. If the sample volume is too high, there is not sufficient radial distance in the centrifuge tube for effective separation of components in a multicomponent sample.

[0589] An approximate sample volume for swinging bucket rotor SW 28 is 1-5 ml per tube (with a tube diameter of 2.54 cm). The sample is applied to the gradient by pipetting the volume on top of the gradient. The blunt end of the pipette is placed at 45-60° angle to the tube wall, approximately 2-3 mm above the gradient. The sample is injected slowly and allowed to run down the wall of the tube onto the gradient. After centrifugation gradient fractions are recovered by carefully inserting a gauge needle until the bottom of the tube and starting to collect fractions of 2 ml by pumping the liquid from the tube into falcon tubes.

[0590] Sucrose density gradients suitable for use with this density gradient centrifugation purification step include 0-60%, 5-60%, 15-60%, 0-50%, 5-50%, 15-50%, 0-40%, 5-40%, and 15-40%. Preferably, the sucrose density gradient is 15-40%, 5-40% or 0-40%.

[0591] Alternatively, a discontinuous sucrose density gradient may be used for purification. A discontinuous sucrose density scheme provides for discrete, overlaying layers of differing sucrose concentrations. In one example, a first layer of 50% sucrose is covered by a second layer of 40% sucrose; the second layer is covered by a third layer of 20% sucrose; the third layer is covered by a fourth layer of 10% sucrose; and the fourth layer is covered by the solution containing the virus to be purified.

[0592] In one embodiment, inactivated virus is purified by a method comprising a first step of chromatography purification and a second step of gradient centrifugation. Preferably the first step comprises liquid affinity chromatography, such as MCS. Preferably, the second step comprises density gradient centrifugation using a swinging bucket rotor.

[0593] Additional purification methods which may be used to purify inactivated SARS virus include the use of a nucleic acid degrading agent, preferably a nucleic acid degrading enzyme, such as a nuclease having DNase and RNase activity, or an endonuclease, such as from Serratia marcescens, commercially available as Benzonase™, membrane adsorbers with anionic functional groups (e.g. Sartobind™) or additional chromatographic steps with anionic functional groups (e.g. DEAE or TMAE). An ultrafiltration/dialfiltration and final sterile filtration step could also be added to the purification method.

[0594] Preferably, the purification includes treatment of the SARS viral isolate with one or more nucleic acid degrading enzymes. These enzymes may be used to reduce the level of host cell nucleic acid in the viral purification process. Nucleic acid digesting enzymes for use in cell culture are known in the art and include, for example, Benzonase™.

[0595] The treatment of the virus with the nucleic acid degrading enzyme and inactivating agent can be performed by a sequential treatment or in a combined or simultaneous manner. Preferably, the nucleic acid degrading agent is added to the virus preparation prior to the addition of the inactivating agent.

[0596] The purified viral preparation of the invention is substantially free of contaminating proteins derived from the cells or cell culture and preferably comprises less than about 1000, 500, 250, 150, 100, or 50 pg cellular nucleic acid/μg virus antigen, preferably less than about 1000, 500, 250, 150, 100, or 50 pg cellular nucleic acid/dose. Still more preferably, the purified viral preparation comprises less than about 20 pg, and even more preferably, less than about 10 pg. Methods of measuring host cell nucleic acid levels in a viral sample are known in the art. Standardized methods approved or recommended by regulatory authorities such as the WHO or the FDA are preferred.

[0597] The invention includes an inactivated vaccine composition comprising a prophylactically effective amount of SARS viral antigen, preferably spike or an immunogenic fragment thereof. The SARS viral antigen is preferably present in a concentration amount of 0.1 to 50 μg antigen/dose, more preferably 0.3 to 30 μg antigen/dose. Still more preferably, the antigen is about 15 μg/dose.

[0598] In one embodiment, a lower concentration of SARS viral antigen is used in inactivated vaccine compositions of the invention. Such lower concentration vaccines may optionally comprise an adjuvant to boost the host immune response to the antigen. In such a “low dose” vaccine, the SARS viral antigen is preferably present in a concentration of less than 15 μg antigen/dose, (i.e., less than 10, 7.5, 5 or 3 μg antigen/dose.

[0599] The inactivated vaccine preparations of the invention may further comprise a stabilizer to preserve the integrity of the immunogenic proteins in the inactivated viral preparation. Stabilizers suitable for use in vaccines are known in the art and may include, for example, buffers, sugars, sugar alcohols, and amino acids. Stabilizing buffers are preferably adjusted to a physiological pH range and may include phosphate buffers, Tris buffers, TE (Tris/EDTA), TEN (Tris/NaCl/EDTA) and Earle's salt solution. Stabilizing sugars may include, for example, one or more of saccharose, glucose, fructose, dextranes, dextranesulphate, and trehalose. Stabilizing sugar alcohols may include, for example, Xylite/Xylitole, Mannite/Mannitol, Sorbite/Sorbitol, and Glycerol. Amino acids suitable for use in the invention include, for example, L-glutamine, arginine, cysteine, and lysine. Additional stabilizers which may be used in the invention include Tartaric acid, Pluronic F 68, and Tween 80.

[0600] SARS viral isolates which may be used for the inactivated viral preparations of the invention may be obtained and identified by any of the mechanisms described supra. For example, a SARS isolate may be obtained from a clinical sample and plaque purified. Such methods of viral isolation are known in the art.

[0601] Further purification procedures can be applied to ensure the seed virus used for preparation of the vaccine does not contain, for example, unwanted adventitious agents. In one embodiment, viral RNA from the viral isolate can be isolated from the virus, purified (and, optionally, the sequence verified through PCR or other means) and then introduced into a suitable cell culture.

[0602] As an example of this technique, a clinical viral sample is plaque purified and amplified on vero cells to generate a sufficient amount of the viral sample for analysis. Cellular remnants are then cleared from the supernatant by centrifugation. The virus can then be pelleted by ultracentrifugation and the pellet resuspended in PBS. After further centrifugation purification, the virus containing fraction is treated with a DNase (and optionally also an RNase). Viral RNA is then isolated from this fraction and transfected into a host cell.

[0603] Examples 2 and 3 provide an illustration of purification of inactivated whole SARS virus using MCS chromatography resin purification followed by density gradient ultracentrifugation.

[0604] Routes and methods of immunization of the vaccines of the invention are discussed in more detail in a section below. Examples 4 and 5 provide illustrations of a mouse immunization scheme with the inactivated SARS virus of the invention.

B. Attenuated SARS Vaccines

[0605] The invention includes a composition comprising an attenuated SARS virus. This composition can be used as a prophylactic or therapeutic SARS virus vaccine. Methods of attenuating viruses are known in the art. Such methods include serial passage of the SARS virus in cultured cells (e.g., mammalian cell culture, preferably fetal rhesus kidney cells or VERO cells—see the discussion in Section A above regarding culture of SARS virus), until the SARS virus demonstrates attenuated function. The temperature at which the virus is grown can be any temperature at which with tissue culture passage attenuation occurs. Attenuated function of the SARS virus after one or more passages in cell culture can be measured by one skilled in the art. As used herein, attenuation refers to the decreased virulence of the SARS virus in a human subject. Evidence of attenuated function may be indicated by decreased levels of viral replication or by decreased virulence in an animal model.

[0606] Other methods of producing an attenuated SARS virus include passage of the virus in cell culture at sub-optimal or “cold” temperatures and introduction of attenuating mutations into the SARS viral genome by random mutagenesis (e.g., chemical mutagenesis) or site specific directed mutagenesis. Preparation and generation of attenuated RSV vaccines (the methods of which will generally applicable to SARS virus) are disclosed in, for example, EP 0 640 128, U.S. Pat. No. 6,284,254, U.S. Pat. No. 5,922,326, U.S. Pat. No. 5,882,651.

[0607] The attenuated derivatives of SARS virus are produced in several ways, such as for example, by introduction of temperature sensitive-mutations either with or without chemical mutagenesis (e.g., 5-fluorouracil), by passage in culture at “cold” temperatures. Such cold adaptation includes passage at temperatures between about 20° C. to about 32° C., and preferably between temperatures of about 22° C. to about 30° C., and most preferably between temperatures of about 24° C. and 28° C. The cold adaptation or attenuation may be performed by passage at increasingly reduced temperatures to introduce additional growth restriction mutations. The number of passages required to obtain safe, immunizing attenuated virus is dependent at least in part on the conditions employed. Periodic testing of the SARS virus culture for virulence and immunizing ability in animals (e.g., mouse, primate) can readily determine the parameters for a particular combination of tissue culture and temperature. The attenuated vaccine will typically be formulated in a dose of from about 10³ to 10⁶ PFU or TCID₅₀, or more for maximal efficacy.

[0608] Attenuated virus vaccines for SARS-CoV also are produced by creating virus chimeras comprising sequences derived from at least two different coronaviruses, one of which is a SARS-CoV. For example, a virus chimera is produced that comprises nonstructural protein encoding genes derived from a first coronavirus (e.g., murine, bovine, porcine, canine, feline, avian coronavirus) and one or more structural protein encoding genes (e.g., spike, E, M) from a SARS-CoV. Alternatively, the virus chimera may comprise sequences derived from a human coronavirus that is not a SARS-CoV (e.g., OC43, 229E) together with sequences from a SARS-CoV. Chimeric coronaviruses of the present invention are generated by a variety of methods, including for example allowing for natural RNA recombination in a eukaryotic (e.g., mammalian) cell that contains RNA from each of the parental coronaviruses (e.g., following infection) or by using standard molecular biology techniques known to those of skill in the art to engineer desired virus chimeras (or portions thereof) as cDNA clones, which may then be used to produce infectious virus (see for example, U.S. Pat. No. 6,593,111 B2; Yount et al., 2003, Proc. Natl. Acad. Sci. USA 100(22):12995-13000). An attenuated phenotype of the coronavirus chimeras described herein can be readily measured by one of skill in the art.

[0609] Attenuated viruses can be also generated by deleting one or more open reading frames (ORFs) that are not essential for viral replication. Preferably, these deletions occur in the structural region of the genome, such as ORF 3a, 3b, 6, 7a, 7b, 8a, 8b, 9b. See e.g., Haijema B J, Volders H, Rottier P J. J Virol. (2004) 78(8):3863-71; and de Haan, C. A., P. S. Masters, X. Shen, S. Weiss, and P. J. Rottier, “The group-specific murine coronavirus genes are not essential, but their deletion, by reverse genetics, is attenuating in the natural host.” Virology (2002) 296:177-189. Deletion of such regions within a coronavirus such as SARS can be achieved, for example, by reverse genetics or “targeted recombination” (See, e.g., Masters, P. S., “Reverse genetics of the largest RNA viruses”, Adv. Virus Res. (1999) 53:245-264.

[0610] Methods of purification of attenuated virus are known in the art and may include one or more of, for instance gradient centrifugation and chromatography. See Gregersen “Herstellung von Virussimpfstoffen aus Zellkulturen” Chapter 4.2 in Pharmazeutische Biotechnology (eds. O. Kayser and R H Mueller) Wissenschaftliche Verlagsgesellschaft, Stuttgart, 2000.

C. Split SARS Vaccines

[0611] The invention includes a composition comprising a split SARS virus formulation and methods for the manufacture thereof. This composition can be used as a prophylactic or therapeutic SARS virus vaccine.

[0612] Methods of splitting enveloped viruses are known in the art. Methods of splitting enveloped viruses are disclosed, for example, in WO 02/28422, incorporated herein by reference in its entirety, and specifically including the splitting agents and methods described therein. Methods of splitting influenza viruses are disclosed, for example, in WO 02/067983, WO 02/074336, and WO 01/21151, each of which is incorporated herein by reference in its entirety.

[0613] The splitting of the virus is carried out by disrupting or fragmenting whole virus, infectious (wild-type or attenuated) or non-infectious (for example inactivated), with a disrupting concentration of a splitting agent. The disruption results in a full or partial solubilisation of the virus proteins, altering the integrity of the virus.

[0614] Preferably, the splitting agent is a non-ionic or an ionic surfactant. Accordingly, the split SARS virus formulations of the invention may also comprise at least one non-ionic surfactant or detergent. Examples of splitting agents useful in the invention include: bile acids and derivatives thereof, non-ionic surfactants, alkylglycosides or alkylthioglycosides and derivatives thereof, acyl sugars, sulphobetaines, betains, polyoxyethylenealkylethers, N,N-dialkyl-Glucamides, Hecameg, alkylphenoxypolyethoxyethanols, quaternary ammonium compounds, sarcosyl, CTAB (cetyl trimethyl ammonium bromide) or Cetavlon.

[0615] Preferably, the ionic surfactant is a cationic detergent. Cationic detergents suitable for use in the invention include detergents comprising a compound of the following formula:

[chemical structure]

[0616] wherein

[0617] R₁ , R₂ and R₃ are the same or different and each signifies alkyl or aryl, or

[0618] R₁and R₂, together with the nitrogen atom to which these are attached form a 5- or 6-membered heterocyclic ring, and

[0619] R₃ signifies alkyl or aryl, or

[0620] R₁, R₂ and R₃ together with the nitrogen atom to which these are attached, signify a 5- or 6-membered heterocyclic ring, unsaturated at the nitrogen atom,

[0621] R₄ signfies alkyl or aryl, and

[0622] X signifies an anion.

[0623] Examples of such cationic detergents are cetyltrimethylammonium salts, such as ceytltrimethylammonium bromide (CTAB) and myristyltrimethylammonium salt.

[0624] Additional cationic detergents suitable for use in the invention include lipofectine, lipofectamine, and DOT-MA.

[0625] Non-ionic surfactants suitable for use in the invention include one or more selected from the group consisting of the octyl- or nonylphenoxy polyoxyethanols (for example the commercially available Triton series), polyoxyethylene sorbitan esters (Tween series) and polyoxyethylene ethers or esters of the general formula:
O(CH₂CH₂O)n-A-R

[0626] wherein n is 1-50, A is a bond or —C(O)—, R is C₁₋₅₀ alkyl or phenyl C₁₋₅₀ alkyl; and combinations of two or more of these.

[0627] The invention comprises a method of preparing a split SARS virus comprising contacting the SARS virus with a sufficient amount of splitting agent to disrupt the viral envelope. The loss of integrity after splitting renders the virus non-infectious. Once the disrupted viral envelope proteins are generally no longer associated with whole intact virions, other viral proteins are preferably fully or partially solubilized and are therefore not associated, or only in part associated, with whole intact virions after splitting.

[0628] The method of preparing a split SARS virus may further comprise removal of the splitting agents and some or most of the viral lipid material. The process may also include a number of different filtration and/or other separation steps such as ultracentrifugation, ultrafiltration, zonal centrifugation and chromatographic steps in a variety of combinations. The process may also optionally include an inactivation step (as described above) which may be carried out before or after the splitting. The splitting process may be carried out as a batch, continuous, or semi-continuous process.

[0629] Split SARS virus vaccines of the invention may include structual proteins, membrane fragments and membrane envelope proteins. Preferably, the split SARS virus preparations of the invention comprise at least half of the viral structural proteins.

[0630] One example of a method of preparing a split SARS virus formulation includes the following steps:

[0631] (i) propagation of the SARS virus in cell culture, such as MRC-5 cells (ATCC CCL-171), WI-38 cells (ATCC CCL-75), fetal rhesus kidney cells or vero cells (See the discussion in Section A, above, regarding culture of SARS virus);

[0632] (ii) harvesting of SARS virus-containing material from the cell culture;

[0633] (iii) clarification of the harvested material to remove non-SARS virus material;

[0634] (iv) concentration of the harvested SARS virus;

[0635] (v) separation of the whole SARS virus from non-virus material;

[0636] (vi) splitting of the whole SARS virus using a suitable splitting agent in a density gradient centrifugation step; and

[0637] (vii) filtration to remove undesired materials.

[0638] The above steps are preferably performed sequentially.

[0639] The clarification step is preferably performed by centrifugation at a moderate speed. Alternatively, a filtration step may be used for example with a 0.2 μm membrane.

[0640] The concentration step may preferably employ an adsorption method, for instance, using CaHPO₄. Alternatively, filtration may be used, for example ultrafiltration.

[0641] A further separation step may also be used in the method of the invention. This further separation step is preferably a zonal centrifugation separation, and may optionally use a sucrose gradient. The sucrose gradient may further comprise a preservative to prevent microbial growth.

[0642] The splitting step may also be performed in a sucrose gradient, wherein the sucrose gradient contains the splitting agent.

[0643] The method may further comprise a sterile filtration step, optionally at the end of the process. Preferably, there is an inactivation step prior to the final filtration step.

[0644] Methods of preparing split SARS virus formulations may further include treatment of the viral formulation with a DNA digesting enzyme. These enzymes may be used to reduce the level of host cell DNA in the viral purification process. DNA digesting enzymes for use in cell culture are known in the art and include, for example, Benzonase®.

[0645] Treatment of the SARS virus formulation with a DNA digesting enzyme may occur at any time in the purification and splitting process. Preferably, however, the SARS virus formulation is treated with a DNA digesting enzyme prior to use of a detergent. Still more preferably, the SARS virus formulation is treated with a DNA digesting enzyme, such as Benzonas, prior to treatment with a cationic detergent, such as CTAB.

[0646] Methods of purification of split virus are known in the art. See J P Gregersen “Herstellung von Virussimpfstoffen aus Zellkulturen” Chapter 4.2 in Pharmazeutische Biotecnologie (eds. O. Kayser and R H Mueller) Wissenschaftliche Verlagsgesellschaft, Stuttgart, 2000.

[0647] The invention includes a split vaccine composition comprising a prophylactically effective amount of SARS viral antigen, preferably spike or an immunogenic fragment thereof. The SARS viral antigen is preferably present in a concentration amount of 0.1 to 50 μg antigen/dose, more preferably 0.3 to 30 μg antigen/dose. Still more preferably, the antigen is about 15 μg/dose.

[0648] In one embodiment, a lower concentration of SARS viral antigen is used in split vaccine compositions of the invention. Such lower concentration vaccines may optionally comprise an adjuvant to boost the host immune response to the antigen. In such a “low dose” vaccine, the SARS viral antigen is preferably present in a concentration of less than 15 μg antigen/dose, (i.e., less than 10, 7.5, 5 or 3 μg antigen/dose.

D. Subunit SARS Vaccines

[0649] The invention includes a composition comprising an isolated or purified SARS viral antigen or a derivative thereof. The composition may further comprise one or more adjuvants.

[0650] SARS viral antigens can be isolated or purified from a SARS virus grown in cell culture. Alternatively, SARS viral antigens can be recombinantly produced by methods known in the art.

[0651] The SARS viral antigens used in the invention can be produced in a variety of different expression systems which are known in the art; for example those used with mammalian cells, baculoviruses, bacteria, and yeast. Such expression systems will typically use polynucleotides encoding the viral antigens of the invention. Such sequences can be obtained using standard techniques of molecular biology, including translating the amino acid sequences listed herein. Accordingly, the invention includes polynucleotides encoding for the viral antigens of the invention. In addition, the viral antigens of the invention can be produced (at least in part, preferably in whole) via synthetic chemistry methods.

[0652] Insect cell expression systems, such as baculovirus systems, are known to those of skill in the art and described in, e.g., Summers and Smith, Texas Agricultural Experiment Station Bulletin No. 1555 (1987). Materials and methods for baculovirus/insert cell expression systems are commercially available in kit form from, inter alia, Invitrogen, San Diego Calif. Similarly, bacterial and mammalian cell expression systems are also known in the art and described in, e.g., Yeast Genetic Engineering (Barr et al., eds., 1989) Butterworths, London.

[0653] A number of appropriate host cells for use with the above systems are also known. For example, mammalian cell lines are known in the art and include immortalized cell lines available from the American Type Culture Collection (ATCC), such as, but not limited to, Chinese hamster ovary (CHO) cells, HeLa cells, baby hamster kidney (BHK) cells, monkey kidney cells (e.g., Hep G2), Madin-Darby bovine kidney (“MDBK”) cells, as well as others. Mammalian sources of cells include, but are not limited to, human or non-human primate (e.g., MRC-5 (ATCC CCL-171), WI-38 (ATCC CCL-75), fetal rhesus lung cells (ATCC CL-160), human embryonic kidney cells (293 cells, typically transformed by sheared adenovirus type 5 DNA), VERO cells from monkey kidneys), horse, cow (e.g., MDBK cells), sheep, dog (e.g., MDCK cells from dog kidneys, ATCC CCL34 MDCK (NBL2) or MDCK 33016, deposit number DSM ACC 2219 as described in WO 97/37001), cat, and rodent (e.g., hamster cells such as BHK21-F, HKCC cells, or Chinese hamster ovary cells (CHO cells)), and may be obtained from a wide variety of developmental stages, including for example, adult, neonatal, fetal, and embryo.

[0654] Similarly, bacterial hosts such as E. coli, Bacillus subtilis, and Streptococcus spp., will find use with the present expression constructs. Yeast hosts useful in the present invention include, inter alia, Saccharomyces cerevisiae, Candida albicans, Candida maltosa, Hansenual polymorpha, Kluyveromyces fragilis, Kluyveromyces lactis, Pichia guillerimondii, Pichia pastoris, Schizosaccharomyces pombe and Yarrowia lipolytica. Insect cells for use with baculovirus expression vectors include, inter alia, Aedes aegypti, Autographa californica, Bombyx mori, Drosophila melanogaster, Spodoptera frugiperda, and Trichoplusia ni.

[0655] Nucleic acid molecules comprising nucleotide sequences of the viral antigens or antibodies of the invention can be stably integrated into a host cell genome or maintained on a stable episomal element in a suitable host cell using various gene delivery techniques well known in the art. See., e.g., U.S. Pat. No. 5,399,346.

[0656] Depending on the expression system and host selected, the molecules are produced by growing host cells transformed by an expression vector under conditions whereby the protein is expressed. The expressed protein is then isolated from the host cells and purified. If the expression system secretes the protein into growth media, the product can be purified directly from the media. If it is not secreted, it can be isolated from cell lysates. The selection of the appropriate growth conditions and recovery methods are within the skill of the art.

[0657] The invention includes a composition comprising an isolated or purified SARS viral antigen or a derivative thereof. The invention also includes a composition comprising at least two isolated or purified SARS viral antigens or derivatives thereof, which have been co-purified or purified separately and then combined. In one embodiment, the SARS viral antigen is a spike (S) protein. In yet another embodiment, the SARS viral antigen is a nucleocapsid (N) protein, a membrane (M) glycoprotein, or an envelope (E) protein. Preferably, the SARS viral antigen is present in the composition in a purity greater than 75% (e.g., 78%, 80%, 82%, 85%, 88%, 90%, 92%, 95%, 98%).

[0658] The invention includes a vaccine composition comprising a prophylactically effective amount of SARS viral antigen, preferably spike or an immunogenic fragment thereof. The SARS viral antigen is preferably present in a concentration amount of 0.1 to 50 μg antigen/dose, more preferably 0.3 to 30 μg antigen/dose. Still more preferably, the antigen is about 15 μg/dose.

[0659] In one embodiment, a lower concentration of SARS viral antigen is used in vaccine compositions of the invention. Such lower concentration vaccines may optionally comprise an adjuvant to boost the host immune response to the antigen. In such a “low dose” vaccine, the SARS viral antigen is preferably present in a concentration of less than 15 μg antigen/dose, (i.e., less than 10, 7.5, 5 or 3 μg antigen/dose.

[0660] The following example illustrates a method of preparing a SARS virus spike (S) protein subunit vaccine.

[0661] SARS virus S antigen may be isolated and purified from a variety of sources and using a variety of methods, including, but not limited to, S antigen expressed in cultured eukaryotic cells (e.g., mammalian cells, such as VERO, CHO) or bacteria (e.g., E. coli). Expression of may be achieved by a variety of means, such as, for example, from SARS virus infected cell culture or cell culture supernatants, from cultured cells stably transformed with a DNA expression cassette encoding the SARS virus S protein (e.g., RNA polymerase II promoter operably linked to a SARS virus S gene), or from cultured cells infected with a replication-competent or replication-incompetent virus-based expression vector (e.g., adenovirus vector, poxvirus vector, alphavirus vector, retrovirus vector) encoding the SARS virus S protein, as a means to eliminate the need to work with infectious SARS virus.

1. Subunit SARS Vaccines Produced from SARS Virus Cultures

[0662] The SARS virus may be grown in cultured mammalian celle, such as VERO cells, then separated from the cultured cells. A SARS viral antigen, such as the S protein, can then be solubilized and separated from the SARS virus, and further isolated and purified.

[0663] In one example, the SARS virus may be produced as described in the Inactivated SARS vaccine examples, then the desired SARS antigen, such as spike protein, may be further purified from the end product using techniques known in the art.

[0664] In another example, a SARS subunit vaccine may be produced as follows. SARS virus may be produced using a desired mammalian cell line on microcarrier beads in large, controlled fermentors. For example, vaccine quality African Green Monkey kidney cells (VERO cells) at a concentration of 10⁵ cells/mL are added to 60 to 75 L of CMRL 1969 media, pH 7.2, in a 150 L bioreactor containing 360 g of Cytodex-1 microcarrier beads and stirred for 2 hours. Additional CMRL 1969 is added to give a total volume of 150 L. Fetal bovine serum (FBS) is added to a final concentration of 3.5%. Glucose is added to a final concentration of 3.0 g/L and glutamine is added to a final concentration of 0.6 g/L. Dissolved oxygen, pH, agitation and temperature are controlled, and cell growth, glucose, lactate and glutamine levels are monitored. When cells are in logarithmic phases usually on days 3 to 4 reached a density of about 1.0-2.5×10⁶ cells/mL, the culture medium is drained from the fermentor and 120 L of CMRL 1969, pH 7.2 (no FBS) is added and the culture stirred for 10 minutes. The draining and filling of the fermentor is usually repeated once but could be repeated up to three times. After washing the cells, the fermentor is drained and 50 L of CMRL 1969 containing 0.1% (v/v) FBS is added. The SARS virus inoculum is added at a multiplicity of infection (m.o.i.) of 0.001 to 0.01. Trypsin may be added to promote efficient infection. Additional CMRL 1969 with 0.1% FBS is added to give a final volume of 150 L. Incubation is continued at 34 C. One viral harvest is obtained from a single fermentor lot, typically at 2-7 days post-infection. Multiple harvests from a single fermentation may also be obtained.

[0665] The isolation and purification of S protein may be effected by a variety of means, as described below. For example, collecting S protein-containing flow-through from ion exchange chromatography of solubilized SARS virus envelope proteins; loading the flow through onto a hydroxyapatite matrix, and selectively eluting the S protein from the hydroxyapatite matrix. The selectively eluted S protein may be further concentrated by tangential flow ultrafiltration.

[0666] Alternatively, the isolation and purification may be effected by collecting S protein-containing flow-through from ion exchange chromatography of the solubilized SARS virus envelope proteins; loading the flow through onto a hydroxyapatite matrix and collecting an S protein-containing flow through, selectively removing detergent used in the solubilization step from the hydroxyapatite matrix flow through to provide isolated and purified S protein. The isolated and purified S protein may be subsequently concentrated by tangential flow ultrafiltration

[0667] Nucleic acid contaminants may be removed from the isolated and purified S protein by treatment with a nucleic acid degrading agent as described above in the Inactivation section. Preferably, the nucleic acid degrading agent is a nuclease, such as for example, Benzonase.

[0668] The isolated and purified S protein may be applied to a gel filtration medium and the S protein subsequently collected therefrom to separate the S protein from contaminants of other molecular weights.

[0669] Alternatively, the isolation and purification may be effected by loading S protein on a first ion-exchange medium while permitting contaminants to pass through the medium, eluting the S protein from the first ion-exchange medium, to separate the S protein from contaminants of other molecular weights. The eluted S protein is applied to a second ion-exchange medium while allowing contaminants to pass through the second ion-exchange medium. The S protein is subsequently eluted therefrom, to provide the isolated and purified S protein. The eluted S protein may be concentrated by tangential flow ultrafiltration.

[0670] Alternatively, substantially pure SARS virus S protein suitable for use as an immunogen in a subunit vaccine formulation may be prepared from infected cell lysates, such as for example using a non-denaturing detergent buffer containing 1% Triton X-100 and deoxycholate to lyse infected cells. The cell lysates are clarified by centrifugation and S protein is purified from the cell lysates by immunoaffinity purification. A monoclonal antibody against the S protein is generated and coupled to beads and a column is constructed with those beads. SARS-infected cell lysates are applied to the column, and the column is washed with PBS containing 0.1% Triton X-100. Protein bound to the column is eluted with 0.1M glycine, pH 2.5, 0.1% Triton X-100. Elution samples are buffered, such as for example, with Tris, and analyzed for the presence of protein. Fractions containing the protein are pooled and dialyzed against PBS

[0671] As discussed above, the present invention includes isolated and purified S protein of SARS virus. In one example, the virus is grown on a vaccine quality cell line, such as VERO cells, and the grown virus is harvested. The virus harvest is filtered and then concentrated typically using tangential flow ultrafiltration using a membrane of desired molecular weight cut-off and diafiltered. The virus harvest concentrate may be centrifuged and the supernatant discarded. The pellet from the centrifugation then is detergent extracted to solubilize the S protein, for example, by resuspending the pellet to the original harvest concentrate volume in an extraction buffer containing a detergent such as a non-ionic detergent including TRITON X-100.

[0672] Following centrifugation to remove non-soluble proteins, the S protein extract is purified by chromatographic procedures. The extract may first be applied to an ion exchange chromatography column such as a TMAE-fractogel or S-fractogel column equilibrated to permit the S protein to flow through while impurities are retained on the column.

[0673] Next, the flow through may be loaded onto a hydroxyapatite column, equilibrated to permit binding of the S protein to the matrix and to permit contaminants to pass from the column. The bound S protein is then eluted from the column by a suitable elutant. The resulting purified solution of S protein may be further processed to increase its purity. The eluate first may be concentrated by tangential flow ultrafiltration using a membrane of desired molecular weight cut-off. The filtrate may be contacted with a polyethylene glycol of desired molecular weight, for example, about 6000 to 8000, to precipitate the protein. Following centrifugation and discard of the supernatant, the pellet may be resuspended in PBS and dialyzed to remove the polyethylene glycol. Finally, the dialyzed solution of S protein may be sterile filtered. The sterile filtered solution may be adsorbed onto alum. The polyethylene glycol precipitation and resuspension purification step may be effected at an earlier stage of the purification operation, if desired.

[0674] Alternatively, SARS virus is recovered following growth and harvesting of the virus, and a concentrate obtained such as, for example using PEG precipitation or tangential flow filtration. The virus is contacted with detergent to solubilize the S proteins. Following centrifugation, the supernatant is recovered to further purification of the S protein and the non-soluble proteins discarded.

[0675] The supernatant is applied to an ion exchange chromatography column, such as a TMAE-fractogel or S-fractogel column, suitably equilibrated to permit retention of the S protein on the column. The S protein is eluted from the ion-exchange column under suitable conditions. The eluate then may be passed through a gel filtration column, such as a Sephacryl S-300 column, to separate the S protein from contaminants of other molecular weights. A hydroxyapatite column may be employed in place of the Sephacryl column.

[0676] The S protein may be eluted from the column to provide a purified solution of S protein. The eluate may be concentrated by tangential flow ultrafiltration using a membrane of desired molecular weight cut-off. The concentrated S protein solution then may be sterile filtered.

[0677] Alternatively, viral harvests may be concentrated by ultrafiltration and the concentrated viral harvests may be subjected to an initial purification step, for example, by gel filtration chromatography, polyethylene glycol precipitation or Cellufine sulfate chromatography. The purified virus may then be detergent extracted to solubilize the S protein. Following solubilization of the S protein, the supernatant may be loaded onto an ion-exchange column such as Cellufine sulfate chromatography column equilibrated to permit the protein to bind to the column while permitting contaminants to flow through. Similarly, a TMAE-fractogel or S-fractogel column may be used in place of the Cellufine sulfate column. The two columns also may be combined in sequential purification steps. The S protein is eluted from the columns to provide a purified solution of the protein. This solution may be concentrated by tangential flow ultrafiltration using a membrane of desired molecular weight cut-off and diafiltered.

[0678] Specifically, in one method of S protein purification, the virus harvest concentrate is centrifuged at 28,000×g for 30 minutes at 4 C. The supernatant is discarded and the pellet resuspended in extraction buffer consisting of 10 mM Tris-HCl, pH 7.0, 150 mM NaCl, 2% (w/v) Triton X-100 to the original harvest concentrate volume. Pefabloc is added to a final concentration of 5 mM. The suspension is stirred at room temperature for 30 minutes. The supernatant, containing the soluble S protein, is clarified by centrifugation at 28,000×g for 30 minutes at 4 C. A TMAE--Fractogel column is equilibrated with 10 mM Tris-HCl, pH 7.0, 150 mM NaCl containing 0.02% Triton X-100. The Triton X-100 supernatant, containing the soluble S protein, is loaded directly onto the TRAE-Fractogel column. The total volume added plus 2 bed volumes of 10 mM Tris-HCl, pH 7.0, 150 mM NaCl containing 0.02% Triton X-100 are collected. The TMAE-Fractogel flow-through containing S protein is diluted 3-fold with 10 mM Tris-HCl, pH 7.0, containing 0.02% Triton X-100.

[0679] An hydroxyapatite column is equilibrated with 10 mM Tris-HCl, pH 7.0, 50 mM NaCl, 0.02% Triton X-100. After loading the TMAE flow-through, the column is washed with 2 column volumes of 10 mM Tris-HCl, pH 7.0, 50 mM NaCl, 0.02% Triton X-100 followed by 4 column volumes of 5 mM sodium phosphate, pH 7.0, 1M NaCl, 0.02% Triton X-100. The proteins are eluted with 4 column volumes of 20 mM sodium phosphate, pH 7.0, 1M NaCl, 0.02% Triton X-100. Fractions are collected based on A280 and the protein content and antigen concentrations are measured. The purified S protein is ultrafiltered by tangential flow ultrafiltration using a 300 kDa NMWL membrane.

2. Recombinant Production of Subunit SARS Vaccines

[0680] As discussed above, SARS virus proteins may be produced by recombinant expression. Host cells suitable for recombinant expression include bacterial, mammalian, insect, yeast, etc. Recombinant expression may be used to produce a full length SARS protein, a fragment thereof, or a fusion therewith.

[0681] Fusion peptides may be used to facilitate the expression and purification of the recombinant SARS protein. For example, recombinant production of the SARS polypeptides can be facilitated by the addition a tag protein to the SARS antigen to be expressed as a fusion protein comprising the tag protein and the SARS antigen. Such tag proteins can facilitate purification, detection and stability of the expressed protein. Tag proteins suitable for use in the invention include a polyarginine tag (Arg-tag), polyhistidine tag (His-tag), FLAG-tag, Strep-tag, c-myc-tag, S-tag, calmodulin-binding peptide, cellulose-binding domain, SBP-tag,, chitin-binding domain, glutathione S-transferase-tag (GST), maltose-binding protein, transcription termination anti-terminiantion factor (NusA), E. coli thioredoxin (TrxA) and protein disulfide isomerase I (DsbA). Preferred tag proteins include His-tag and GST. A full discussion on the use of tag proteins can be found at Terpe et al., “Overview of tag protein fusions: from molecular and biochemical fumdamentals to commercial systems”, Appl Microbiol Biotechnol (2003) 60:523-533.

[0682] After purification, the tag proteins may optionally be removed from the expressed fusion protein, i.e., by specifically tailored enzymatic treatments known in the art. Commonly used proteases include enterokinase, tobacco etch virus (TEV), thrombin, and factor Xₐ.

[0683] Accordingly, the invention further includes a SARS virus subunit vaccine comprising a fusion protein. Preferably, the fusion protein comprises a first amino acid sequence encoded by a SARS virus polynucleotide sequence. SARS virus polynucleotide sequences which may encode said first amino acid sequence include one or more of the SARS virus polynucleotide sequences identified in this application and fragments thereof.

[0684] The fusion protein may comprise an amino acid sequence of a SARS virus protein or a fragment thereof. Said SARS virus protein may be selected from one or more of the group consisting of the following SARS virus proteins: P28, P65, Nsp1, Nsp2 (3CL protease), Nsp3, Nsp3, Nsp4, Nsp 5, Nsp6, Nsp 7, Nsp 8, Nsp 9 (RNA polymerase), Nsp 10 (helicase), Nsp 11, Nsp 12, Nsp 13, Spike, Orf 3, Orf 4, Envelope, Matrix, Orf7, Orf8, Orf9, Orf10, Orf11, Nucleocapsid and Orf13.

[0685] In one embodiment, the fusion protein comprises a first amino acid sequence comprising a SARS virus antigen or a fragment thereof. Said SARS virus amino acid sequence may comprise one or more of the T-epitope sequences identified above.

[0686] Preferably, the fusion protein comprises an amino acid sequence of a SARS virus spike protein, or a fragment thereof. Specific fragments of the spike protein which may be used in the fusion protein include the S1 domain and the S2 domain. Further fragments of the spike protein which may be used in the fusion protein include regions of each of the S1 and S2 domains, including the receptor binding region of the S1 domain, the oligomerization domain regions of the S2 domain, the leucine zipper regions of the S2 domain, the membrane anchor region of the S2 domain, the hydrophobic domain region of the S2 domain, the cystein-rich domain region of the S2 domain, and the cytoplasmic tail region of the S2 domain. (See FIG. 19). Amino acid sequences of the Spike protein corresponding to these regions can be identified by those skilled in the art, including, for example, using the functional predictions set forth earlier in the application (predicted transmembrane helices, predicted N-terminus signaling regions, predicted coiled-coil regions, etc.) as well as by homology comparison to the sequences of other known Coronaviruses (See FIGS. 4F and 5).

[0687] The fusion protein may further comprise a second amino acid sequence. Said second amino acid sequence may comprise a polypeptide sequence which facilitates protein expression or purification, preferably one of the tag sequences discussed above. Alternatively, said second amino acid sequence may comprise a second amino acid sequence from a SARS virus. Alternatively, said second amino acid sequence may comprises an amino acid sequence from another virus or bacteria, including one or more of the viruses or bacteria identified in Section I, below.

[0688] Said second amino acid sequence may comprise an amino acid sequence from another respiratory virus. Said second amino acid sequence may comprise an amino acid sequence from a virus selected from the group consisting of coronavirus, influenza virus, rhinovirus, parainfluenza virus (PIV), respiratory syncytial virus (RSV), adenovirus, and metapneumovirus.

[0689] In one embodiment, said second amino acid sequence may comprise an amino acid sequence from an adjuvant, including one or more of the adjuvants identified in section I, below.

[0690] In one embodiment, the invention includes a fusion protein comprising an amino acid sequence of a SARS virus spike protein or a fragment thereof. The fusion protein may further comprise a second amino acid sequence comprising an amino acid sequence selected from the group consisting of a second SARS virus protein, a non-SARS virus protein, a bacterial protein, and an adjuvant.

(a) Bacterial Expression of Subunit SARS Vaccines

[0691] In one embodiment, bacterial host cells are used for recombinant expression of SARS virus proteins. Bacterial host cells suitable for use in the invention include, for example, E. coli, Bacillus subtilis, and Streptococcus spp.

[0692] The SARS viral protein may be modified to facilitate bacterial recombinant expression. In particular, the SARS spike protein may be modified to facilitate transport of the spike protein to the surface of the bacterial host cell.

[0693] Applicants have discovered that there is strong structural homology between the SARS virus spike protein and the NadA protein of Neisseria meningitidis. Both proteins have an N-terminal globular “head” domain (amino acids 24-87), an intermediate alpha-helix region with high propensity to form coiled-coil structures (amino acids 88-350), and a C-terminal membrane anchor domain formed by four amphipatix transmembrane beta strands (amino acids 351-405 of NadA). In addition, a leucine zipper motive is present within the coiled-coil segment. See, FIG. 19 depicting the SARS spike protein structure Comanducci et al., “NadA, a Novel Vaccine Candidate of Neisseria meningitidis”, J. Exp. Med. 195 (11): 1445-1454 (2002). In addition, a leucine zipper motif of NadA is present within the coiled-coil segment. The NadA protein also forms high molecular weight surface-exposed oligomers (corresponding to three or four monomers) anchored to meningococcal outer membrane.

[0694] When the NadA protein is expressed in E. coli, the full-length protein is assembled in oligomers anchored to the outer membrane of E. coli, similar to the way the protein is presented in meningococcus. The NadA protein devoid of the predicted membrane anchor domain is then secreted into the culture supernatant. This secreted protein is soluble and still organized in trimers.

[0695] The invention therefore includes a fusion protein comprising an amino acid sequence of a SARS virus spike protein or a fragment thereof and a second amino acid sequence of a bacterial adhesion protein or a fragment thereof. Preferably, said adhesion protein is selected from the group consisting of NadA, YadA (of enteropathogenic Yersinia), and UspA2 (of Moraxella catarrhalis). Additional NadA-like proteins include serum resistance protein DsrA of Haemophilus ducreyi, the immunoglobulin binding proteins EibA, C, D, and F of E. coli, outer membrane protein 100 of Actinobacillus actinomycetemcomitans, the saa gene carried on the large virulence plasmid present in shiga toxigenic strains of E. coli (STEC), and each of the bacterial adhesion proteins described in U.K. Patent Application No. 0315022.4, filed on Jun. 26, 2003, each of which are specifically incorporated herein by reference.

[0696] Preferably, said adhesion protein comprises NadA or a fragment thereof.

[0697] Such fusion proteins may be used to facilitate recombinant expression of immunogenic portions of SARS surface antigens, such as spike. These fusion constructs may also allow the SARS S1 and/or S2 domains to adapt to a native confirmation. These fusion proteins are also able to oligomerize and form dimers or trimers, allowing the S1 and/or S2 domains to associate and adapt conformations as in the native SARS spike protein. Further, these expression constructs facilitate surface exposure of the SARS spike protein.

[0698] The fusion proteins of the invention preferably comprise a leader peptide from a NadA like protein, preferably NadA, a polypeptide from the immunogenic “head” region of the spike protein, and a stalk region from either the NadA like protein or the Spike protein. During expression and processing of the fusion protein, one or more amino acids may be cleaved off or removed, such as, i.e., the leader peptide or a membrane anchor domain.

[0699] The stalk regions facilitate oligomerization of the expression protein. Optionally, the fusion proteins of the invention further include an anchor region of a NadA like protein. This anchor region allows the expression fusion protein to anchor and assemble on the bacterial cell surface.

[0700] The fusion proteins of the invention include the following constructs:

[0701] (i) the NadA leader peptide (optionally also including the first 6 amino acids of the mature NadA protein to facilitate processing of the leader peptide and appropriate maturation of the protein) followed by the Spike S1 domain. Preferably, this construct comprises amino acids 1-29 of NadA (corresponding to the NadA leader peptide and the first 6 amino acids of the mature NadA protein, as shown in FIG. 22 and as set forth below) followed by amino acids 14-662 of a SARS virus Spike protein (corresponding to the S1 domain, see FIG. 19 and SEQ ID NO: 6042 and as set forth below). Specifically, construct (i) comprises SEQ ID NO: 7302.

[0702] (ii) the NadA leader peptide (optionally also including the first 6 amino acids of the mature NadA protein to facilitate processing of the leader peptide and appropriate maturation of the protein) followed by the Spike S1 domain, followed by the stalk and anchor membrane domains of NadA. Preferably, this construct comprises amino acids 1-29 of NadA (corresponding to the NadA leader peptide and the first 6 amino acids of the mature NadA protein, as shown in FIG. 22 and as set forth below) followed by amino acids 14-662 of a SARS virus Spike protein (corresponding to the S1 domain, see FIG. 19 and SEQ ID NO: 6042 and as set forth below) followed by amino acids 88-405 of NadA (corresponding to the stalk and the anchor membrane domains). Specifically, construct (ii) comprises SEQ ID NO: 7303.

[0703] (iii) the NadA leader peptide (optionally also including the first 6 amino acids of the mature NadA protein) followed by a SARS virus Spike S1 domain, followed by the NadA stalk domain. Preferably, this construct-comprises amino acids 1-29 of NadA followed by amino acids 14-662 of a SARS virus Spike protein (corresponding to the S1 domain), followed by amino acids 88-350 of NadA (corresponding to the stalk domain). Specifically, construct (iii) comprises SEQ ID NO: 7304.

[0704] (iv) the NadA leader peptide (optionally also including the first 6 amino acids of the mature NadA protein), followed by a SARS virus Spike S1 and S2 domain (excluding the putative transmembrane region), followed by the anchor domain of NadA. Preferably, this construct comprises amino acids 1-29 of NadA, followed by amino acids 14-1195 of a SARS virus Spike protein (corresponding to S1 and S2, excluding the putative transmembrane region), followed by amino acids 351-405 of NadA (corresponding to the NadA anchor domain). Specifically, construct (iv) comprises SEQ ID NO: 7305. Alternatively, the NadA anchor domain may comprise amino acids 332-405 of NadA.

[0705] (v) the NadA leader peptide (optionally also including the first 6 amino acids of the mature NadA protein), followed by a SARS virus Spike S1 and S2 domain (exclusing the putative transmembrane region). Preferably, this construct comprises amino acids 1-29 of NadA, followed by amino acids 14-1195 of a SARS virus Spike protein. Specifically, construct (v) comprises SEQ ID NO: 7306.

[0706] In each of constructs (i) to (v), the first 23 amino acids are the NadA leader peptide, and the GS dipeptide at residues 679-680 arises from the insertion of a restriction enzyme site.

[0707] In constructs (i), (ii) and (iii), the NadA “head” is replaced by the Spike S1 domain, and the fusion proteins are anchored to the outer membrane of E. coli or secreted in the culture supernatant, respectively. In constructs (iv) and (v), the “head” and “stalk” domains of NadA are replaced by S1 and S2 Spike domains; also in this case, the two fusion proteins are anchored to the outer membrane of E. Coli or secreted in the culture supernatant, respectively.

[0708] Accordingly, the invention further includes a fusion protein comprising an amino acid sequence of a SARS virus spike protein or a fragment thereof and a second amino acid sequence of a bacterial adhesion protein or a fragment thereof. Preferably, amino acids corresponding to the “head” of the adhesion protein are replaced by amino acids corresponding to a SARS virus Spike S1 domain. Alternatively, the amino acids corresponding to the “head” and “stalk” domains of the bacterial adhesion protein are replaced by amino acids corresponding to the SARS virus spike protein S1 and S2 domains.

[0709] As discussed above and shown in FIG. 19, the S1 domain of the Spike protein is identified as the globular receptor binding “head” region. The S1 domain of the Spike protein preferably comprises about amino acids 14-662 of SEQ ID NO: 6042. The S1 domain may comprise a shorter amino acid sequence, wherein amino acids are removed from either the N-terminal or C-terminal regions. Preferably, 3, 5, 7, 9, 13, 15, 20 or 25 amino acids are removed from either the N-terminal or C-terminal regions. The S1 domain further includes amino acid sequences having sequence identity to the S1 region of SEQ ID NO: 6042. An example of the S1 domain is SEQ ID NO: 7307:

[0710] As discussed above and shown in FIG. 19, the S2 domain of the Spike protein is identified as the “stalk” region. The “stalk” region comprises oligomerization domain regions, a leucine zipper domain regions, membrane anchor regions, hydrophobic domain regions, cystein-rich domain region and a cytoplasmic tail region. The S2 domain of the Spike protein preferably excludes the transmembrane region and comprises about amino acids 663-1195 of SEQ ID NO: 6042. The S2 domain may comprise a shorter amino acid sequence, wherein amino acids are removed from either the N-terminal or C-terminal regions. Preferably, 3, 5, 7, 9, 13, 15, 20 or 25 amino acids are removed from either the N-terminal or C-terminal regions. The S2 domain further includes amino acid sequences having sequence identity to the S2 region of SEQ ID NO: 6042. An example of the S1 domain (with the transmembrane region excluded) is SEQ ID NO: 7308.

[0711] An example of the NadA protein described above is SEQ ID NO: 7309. As discussed above, the leader sequence of NadA used in the fusion protein preferably comprises about the first 29 amino acids of NadA (including a leader sequence with about 6 amino acids of the NadA head protein). Examples of such a leader sequences are set forth as SEQ ID NOS: 7310 and 7311 below. The fusion protein may use a leader sequence comprising a shorter amino acid sequence, wherein amino acids are removed from either the N-terminal or C-terminal regions. Preferably, 1, 2, 3, 4, or 5 amino acids are removed from either the N-terminal or C-terminal end of the sequence. The leader sequence used in the fusion protein may also include an amino acid sequences having sequence identity to SEQ ID NO: 7310 or SEQ ID NO: 7311. Preferably, the leader sequence comprises SEQ ID NO: 7311.

[0712] Optionally, the fusion peptide comprises about the first 6 amino acids of the mature NadA protein to facilitate processing of the leader peptide and appropriate maturation of the protein. An examples of the first 6 amino acids of a mature NadA proteins is SEQ ID NO: 7312.

[0713] As discussed above, the stalk and anchor sequences of NadA used in the fusion protein preferably comprise about amino acids 88-405 of NadA. An example of an amino acid sequence comprising NadA stalk and anchor regions is set forth below as SEQ ID NO: 7313 below. An example of an amino acid sequence comprising a NadA stalk region (without the anchor region) is set forth as SEQ ID NO: 7314 below. An example of an amino acid sequence comprising a NadA anchor region is set forth as SEQ ID NO: 7315 below. The fusion protein may use a stalk (and/or anchor) sequence comprising a shorter amino acid sequence, wherein amino acids are removed from either the N-terminal or C-terminal regions. Preferably, 1, 2, 3, 4, 5, 6, 7, 8 or 9 amino acids are removed from either the N-terminal or C-terminal end of the sequence. The leader sequence used in the fusion protein may also include an amino acid sequences having sequence identity to the SEQ ID NO: 7313.

[0714] The fusion proteins of the invention, including those described above, may be prepared, for example, as follows. Single fragments (such as the regions described above) may be amplified by PCR using the oligonucleotide primers set forth in the Table below. (S1_{L} refers to the Spike protein fused to the leader peptide of NadA; S2 refers to the stalk region of the Spike protein, with and without the stop codon). The oligonucleotides were designed on the basis of the DNA sequence of NadA from N. meningitidis B 2996 strain and of Spike from SARS virus isolate FRA1. Each oligonucleotide includes a restriction site as a tail in order to direct the cloning into the expression vector pET21b.

| | | SEQ ID NO: | Restriction site |
|---|---|---|---|
| S1_{L} | For | 7316 | NdeI |
| S1_{L} | Rev | 7317 | BamHI |
| S2 | For | 7318 | BamHI |
| S2 | Rev | 7319 | HindIII |
| S2-stop | Rev | 7320 | XhoI |
| NadA₈₈ | For | 7321 | BamHI |
| NadA₃₅₀ | Rev | 7322 | XhoI |
| NadA₃₃₂ | For | 7323 | HindIII |
| NadA₄₀₅ | Rev | 7324 | XhoI |

[0715] The single fragments are sequentially cloned into pET21b vector, in order to express the proteins under the control of inducible T7 promoter. The S1 domain of the Spike protein fused to the leader peptide of NadA (S1_{L}) was obtained by PCR using the primers S1_{L}-For and S1_{L}-Rev. The forward oligonucleotide primer contains the NdeI restriction sequence and the sequence coding for the leader peptide of NadA plus the first 6 aminoacids of the mature protein. The PCR fragment was cloned as a NdeI/BamHI fragment in the pET21b vector opened with the same restriction enzymes. This clone (PET-S1_{L}) was then used to sequentially clone the other different domains, as BamHI/XhoI, BamHI/HindIII or HindIII/XhoI fragments. BamHI and HindIII restriction sites introduce the aminoacids GS and KL, respectively.

[0716] The PCR amplification protocol was as follows: 200 ng of genomic DNA from Neisseria meningitidis 2996 or 10 ng of plasmid DNA preparation (plasmid pCMVnew, containing the entire gene coding of the Spike protein), were used as template in the presence of 40 μM of each oligonucletide primer, 400-800 μM dNTPs solution, 1× PCR buffer (including 1.5 mM MgCl₂), 2.5 units TaqI DNA polymerase (using Perkin-Elmer AmpliTaQ or Invitrogen Platinum Pfx DNA polymerase).

[0717] After a preliminary 3 minute incubation of the whole mix at 95° C., each sample underwent a two-step amplification: the first 5 cycles were performed using the hybridisation temperature that excluded the restriction enzyme tail of the primer (Tm1). This was followed by 30 cycles according to the hybridisation temperature calculated for the whole length oligos (Tm2). Elongation times, performed at 68° C. or 72° C., varied according to the length of the fragment to be amplified. The cycles were completed with a 10 minute extension step at 68° C. or 72° C.

[0718] The amplified DNA was either loaded directly on agarose gel and the DNA fragment corresponding to the band of correct size was purified from the gel using the Qiagen™ Gel Extraction Kit, following the manufacturer's protocol.

[0719] The purified DNA corresponding to the amplified fragment and the plasmid vectors were digested with the appropriate restriction enzymes, purified using the QIAquick™ PCR purification kit (following the manufacturer's instructions) and ligation reactions were performed.

[0720] The ligation products were transformed into competent E. coli DH5α and screening for recombinant clones was performed by growing randomly-selected colonies and extracting the plasmid DNA using the Qiagen QIAprep Spin Miniprep Kit, following the manufacturer's instructions.

[0721] Recombinant plasmids were introduced into E. coli BL21(DE3) used as expression host. Single recombinant colonies were inoculated into LB+ ampicillin and incubated at 37° C. for 14-16 h. Bacteria were directly recovered by centrifugation (uninduced conditions) or diluted in fresh medium and grown at 37° C. until OD₆₀₀ between 0.4-0.8. Protein expression was induced by addition of 1 mM Isopropyl-1-thio-β-D-galactopyranoside (IPTG) for three hours (induced conditions).

[0722] Whole cell lysates were obtained resuspending bacteria in SDS-sample buffer 1× and boiling for 5-10 min. Equal amounts of proteins were separated using NuPAGE (Invitrogen) or BIORAD Gel System, according to the manufacturer's instructions. Proteins were revealed by Coomassie-blue staining or transferred onto nitrocellulose membranes for western blot analysis. Western blot was performed using a rabbit polyclonal anti-serum against purified NadA_{Δ351-405} (diluted 1:3000) and a secondary peroxidase-conjugate antibody (DAKO).

[0723] Results of the expression in E. coli of S1_{L}, S1_{L}-NadA and S1_{L}-Nad_{Δanchor} are shown in FIGS. 38 and 39. Schematics of the fusion constructs are shown in FIG. 37.

[0724] Bacterial expression of the SARS viral antigens may also be used to prepare compositions comprising outer membrane vesicles wherein said outer membrane vesicles comprise one or more SARS viral antigens.

[0725] Outer Membrane Vesicles (“OMV”), also referred to as blebs, refer to vesicles formed or derived from fragments of the outer membrane of a Gram negative bacterium. OMVs typically comprise outer membrane proteins (OMPs), lipids, phospholipids, periplasmic material and lipopolysaccharide (LPS). Gram negative bacteria often shed OMVs during virulent infections in a process known as blebbing. OMVs can also be obtained from Gram negative bacteria via a number of chemical denaturation processes, such as detergent extraction. Synthetic OMVs or liposomes, comprising a lipid bilayer and typically enclosing an aqueous core, can also be prepared with the SARS viral antigens of the invention.

[0726] The OMVs of the invention are preferably lipid vesicles comprising a lipid bilayer surrounding an aquous core. Typically the lipid vesicles are of unilamellar structure (i.e., a single lipid bilayer surrounds the aquous core), although multilammelar lipid vesicles may also be used in the compositions of the invention. OMVs typically have sizes in the nanomolar to micromolar range, e.g., from 1 nM to 100 μM, more typically from 10 nM to 10 μM and preferably from 30 nM to 1 μM.

[0727] The OMVs of the invention are preferably prepared from gram negative bacteria. Gram negative bacteria are those bacteria that fail to resist decolorization in the commonly known Gram staining method. Gram negative bacteria are characterized by a complex multilater cell wall and often possess an outer layer polysaccharide capsule. Gram negative bacteria suitable for producing OMVs include, for example, species from Neisseria, Moraxella, Kingella, Acinetobacter, Brucella, Bordetella, Chlamydia, Porphyromonas, Actinobacillus, Borelia, Serratia, Campylobacter, Helicobacter, Haemophilus, Escherichia, Legionella, Salmonella, Pseudomonas and Yersinia.

[0728] The OMVs of the invention preferably comprise one or more SARS viral antigens or a fragment thereof. The SARS viral antigens may be recombinantly expressed in a Gram negative bacterial host cell and then harvested with the OMV.

[0729] Antigenic components, such as recombinantly expressed SARS viral antigens, may be located in any or all of the three main compartments of the lipid vesicles, including attached to either the interior or exterior surface of the lipid vesicle, for example via a membrane anchor domain, or attachment to a lipid moiety; inserted into the lipid bilayer, for example where the antigenic component is itself a hydrophobic or lipid based entity; or located within the aqueous center or core of the lipid vesicle.

[0730] Synthetically prepared OMVs, or liposomes, may be used in the invention. Such liposomes may comprise a number of different lipids and fatty acids. Suitable lipids for inclusion in liposomes of the invention include but are not limited to phophatidylinositol-(4,5)-diphosphate, phosphatidylserine, phosphatidylcholine, phosphatidylethanolamine, phosphatidyglycerol, cholesterol, beta-oleolyl-gamma-palmitoyl, lipopolysaccharides and galactocerbrosides.

[0731] Suitable means for extraction of OMVs from bacterial sources include deoxycholate extraction, Tris/HCl/EDTA extraction, and lithium acetate extraction. Preferably, the extraction process comprises a physical and/or chemical means to disrupt the bacterial cell outer membrane in order to release sufficient OMVs for purification and isolation. See, e.g., WO 03/051379.

[0732] The OMVs of the invention may be enriched and/or supplemented with antigenic components, such as SARS viral antigens, by methods known in the art, including, for example, direct combination in vitro where an energetic combination step can optionally be applied to facilitate integration of the antigenic component into a compartment of the liposome. Methods of energetic combination suitable for use in the invention include homogenization, ultrasonication, extrusion, and combinations thereof.

[0733] Preferably, the antigenic component, such as the SARS viral antigen, is recombinantly produced by the host cell from which the OMV is derived. In one embodiment, such OMVs are prepared by introducing nucleic acid sequence encoding for the SARS viral antigen into the recombinant host cell. Preferably the nucleic acid sequence encoding for the SARS viral antigen is controlled by a strong promoter sequence. Preferably, the nucleic acid sequence encoding the SARS viral antigen further comprises an outer-membrane targeting signal. For example, the nucleic acid sequence encoding the SARS viral antigen may be fused to a sequence encoding for a naturally occurring outer membrane protein of the bacterial host. Preferably, the nucleic acid sequence encoding the SARS viral antigen is fused to the signal peptide sequence of the naturally occurring outer membrane protein of the bacterial host.

[0734] Methods of preparing an optimizing OMVs for use in vaccines are disclosed in, for example Filip et al., J. Bact. (1973) 115: 717-722; Davies et al., J. Immunol. Method (1990) 143:215-225; and WO 01/09350.

[0735] In one embodiment, a bacterial host cell, such as E. coli, are transformed to express the SARS spike protein. As discussed above, the spike protein may be modified to facilitate bacterial expression and transport of the spike protein to the surface of the host cell. Each of the Spike/NadA fusion constructs discussed above may be used in the OMV preparations of the invention. Preferably, constructs comprising the spike S1 globular head domain fused to the stalk region of NadA are used to generate OMVs. The construct may optionally include the NadA leader peptide as well as the NadA anchor peptide. Schematic diagrams of these preferred OMV constructs are depicted in FIG. 49.

[0736] Example 6 describes one method of preparing the OMVs of the invention.

(b) Mammalian Expression of Subunit SARS Vaccine

[0737] As discussed above, mammalian host cells may be used for recombinant expression of SARS virus proteins. Mammalian host cells suitable for use in the invention include, for example, Chinese hamster ovary (CHO) cells, HeLa cells, baby hamster kidney (BHK) cells, monkey kidney cells (e.g., Hep G2), Madin-Darby bovine kidney (“MDBK”) cells, as well as others. Mammalian sources of cells include, but are not limited to, human or non-human primate (e.g., MRC-5 (ATCC CCL-171), WI-38 (ATCC CCL-75), human embryonic kidney cells (293 cells, typically transformed by sheared adenovirus type 5 DNA), VERO cells from monkey kidneys (including, for example COS7 cells), horse, cow (e.g., MDBK cells), sheep, dog (e.g., MDCK cells from dog kidneys, ATCC CCL34 MDCK (NBL2) or MDCK 33016, deposit number DSM ACC 2219 as described in WO 97/37001), cat, and rodent (e.g., hamster cells such as BHK21-F, HKCC cells, or Chinese hamster ovary cells (CHO cells)), and may be obtained from a wide variety of developmental stages, including for example, adult, neonatal, fetal, and embryo.

[0738] The polynucleotides encoding the SARS viral proteins may be modified to facilitate or enhance expression. For example, commercial leader sequences known in the art, such as tPA or IgK or interleukin-2, may be used in the recombinant constructs. Preferably, however, the natural SARS leader sequence is used. Use of the natural leader sequence can be used to ensure that the protein will be trafficked in human cells in the same way as during a normal viral infection, which may be advantageous e.g. for DNA vaccines, where antigen is expressed in situ.

[0739] As discussed above, tag sequences can be used in the expression constructs to facilitate purification, detection and stability of the expressed protein. Tag proteins suitable for use in the invention include a polyarginine tag (Arg-tag), polyhistidine tag (His-tag), FLAG-tag, Strep-tag, c-myc-tag, S-tag, calmodulin-binding peptide, cellulose-binding domain, SBP-tag, chitin-binding domain, glutathione S-transferase-tag (GST), maltose-binding protein, transcription termination anti-terminiantion factor (NusA), E. coli thioredoxin (TrxA) and protein disulfide isomerase I (DsbA). Preferred tag proteins include His-tag and GST. A full discussion on the use of tag proteins can be found at Terpe et al., “Overview of tag protein fusions: from molecular and biochemical fundamentals to commercial systems”, Appl Microbiol Biotechnol (2003) 60:523-533.

[0740] After purification, the tag proteins may optionally be removed from the expressed fusion protein, i.e., by specifically tailored enzymatic treatments known in the art. Commonly used proteases include enterokinase, tobacco etch virus (TEV), thrombin, and factor Xₐ.

[0741] One or more amino acid sequences or amino acid domains of the spike protein may be removed to facilitate mammalian recombinant expression. For instance, the entire S2 domain or the spike transmembrane region may be removed. Representative examples of some expression constructs of both full length and truncated spike glycoprotein suitable for mammalian expression are shown in FIG. 40. Polynucleotide sequences representing each construct are shown in SEQ ID NOS 6578-6583. A description of each annotation is shown below:

| Clone | | Expression |
|---|---|---|
| Name | Description | Construct |
| nSh | natural leader sequence | SEQ ID NO: 6578 |
| | full length Spike | |
| | histidine tag | |
| nS | natural leader sequence | SEQ ID NO: 6579 |
| | full length Spike | |
| nShΔTC | natural leader sequence | SEQ ID NO: 6580 |
| | Spike without transmembrane sequence | |
| | histidine tag | |
| nSΔTC | natural leader sequence | SEQ ID NO: 6581 |
| | Spike without transmembrane sequence | |
| nS1h | natural leader sequence | SEQ ID NO: 6582 |
| | S1 domain | |
| | histidine tag | |
| nS1 | natural leader sequence | SEQ ID NO: 6583 |
| | S1 domain | |

[0742] Cloned cDNA fragments that encompass full-length Spike coding sequences, as well as a Spike construct deleted of the transmembrane and cytoplasmic domains (TM-Cy-deleted Spike) for secretion were inserted into an expression vector pCMVIII to create nSh and nShΔTC, respectively. Both spike proteins were tagged with six histidine residues at the end of C-terminus to aid initial characterization of the expressed spike proteins. Similar sequences encoding full-length Spike or transmembrane and cytoplasmic domain deleted Spike, but without the histidine “tag” are readily substituted by one of skill in the art.

[0743] The likely locations of the expressed spike constructs was assessed by separating expressed proteins into an aqueous fraction (AF) and a detergent fraction (DF) using the procedure shown in FIG. 48, with results of western blot analysis shown in FIG. 43. The above described vector constructs were evaluated for expression after transfection into COS7 cells. The construct expressing the full length spike protein remained in the cell membrane while the construct expressing the truncated spike protein was located either in the cytosol (FIG. 43) or secreted into the cell medium (FIG. 44). As shown in FIG. 43, full-length spike protein is found in DF (membrane) in an aggregated form, while the truncated protein is found in AF (cytosol) as a monomer. As shown in FIG. 44, deleted proteins (ShΔTC) are secreted, and a small fraction of full-length spike protein is detected in the medium by rabbit serum.

[0744] Recombinantly expressed spike proteins may be oligomerized. When the spike proteins are to be used in a vaccine or to generate antibodies specific to the spike protein, they are preferably oligomerized. In order to obtain oligomerized spike protein, it is preferred to maintain the transmembrane domain in the recombinant expression construct. For example, FIG. 41 illustrates a western blot of COS7 cell lysates comparing expressed nSh and nShΔTC using both anti-his tag and rabbit anti-SARS antibodies. As shown full-length (nSh) aggregates, but the truncated (nShΔTC) spike protein does not. Antibody raised against the His-tagged protein recognizes full-length and truncated spike proteins in native and reduced forms. Rabbit antiserum recognizes spike protein only in non-reducing conditions. Spike aggregates or oligomers were present in larger amounts in the cell lysates from the expressed nSh constructs. Preferably, the oligomerized spike proteins form a homotrimer, as indicated in FIG. 47

[0745] A further experiment, illustrated in FIG. 42, demonstrates that the oligomerization of the expressed nSh constructs is likely due to a non-covalent linkage (and is likely not due to, for example, a disulfide bond). The oligomer dissociates into monomers at elevated temperature (80-100° C.), but is stable in reducing conditions if not heated.

[0746] It is further preferred that recombinantly expressed spike proteins are glycoslyated. Tunicamycin and glycosidases were used to assess glycosylation. FIG. 45 illustrates that glycoslation of expressed spike proteins is not affected by removal of the transmembrane domain region. Both full-length (Sh) and truncated (ShΔTC) SARS spike proteins are glycosylated.

[0747] Preferably, expression of the constructs of the invention is not toxic to the mammalian host cell. FIG. 46 demonstrates that expression of the illustrated spike constructs is not toxic to the COS7 host cell.

[0748] Methods for transfecting, expressing, culturing, isolating and purifying recombinant proteins from mammalian cell cultures are known in the art. For example, the SARS spike constructs of the invention may be expressed in 293 cells. These cells may be cultured and transfected in static or monolayer cultures. For rapid large-scale production of SARS protein antigens in sufficient quantities for in vitro and in vivo evaluation, including immunogenicity studies, large-scale transient transfection of 293 (human embryonic kidney) cells may be used to obtain milligram quantities of the recombinant antigen(s). Alternatively, larger scale transfection of these cells may be performed with 293 cells in suspension culture. Preferably, the expressed SARS proteins are harvested from the transfected cells between 48 and 72 hours after transfection or even from 72 to 96 or more hours after transfection.

[0749] Where the host cells are transfected with truncated spike expression constructs, the expressed spike protein is secreted from the host cells and collected from the cell media. After concentration, the spike protein may be purified from the media using, for example, GNA lectin followed by DEAE and ceramic hydroxyapatite column chromatography.

[0750] Where the host cells are transfected with full length spike expression constructs, but rather is retained within the cells, and may be purified from triton X-100 detergent extracted cells. The full-length Spike protein can then be captured on GNA lectin, followed by hydroxyapatite and SP chromatography.

[0751] Chinese Hamster Ovary (CHO) or other eukaryotic (e.g., mammalian) cells that stably express the SARS viral antigens of the invention may also be derived (e.g. FIG. 73). Preferably, the cells are CHO cells, and these constructs will comprise one or more marker or selection genes in order to select for the desired CHO cells. In one embodiment, the constructs comprise a CMV enhancer/promoter, ampicillin resistance gene, and a fused DHFR and attenuated neomycin gene for selection purposes. Stable cell lines can then be produced using the neomycin selection system in CHOK-1 cells. Selected clones can then be sequenced to verify the integrity of the insert, and transient transfections can then be performed using Trans-LT1 polyamine transfection reagent (PanVera Corp., Madison, Wis.) to assess the expression level and also the integrity of the expressed protein by ELISA and western blot analysis.

[0752] Methods for derivation of CHO cells stably expressing the SARS viral antigens of the invention comprise the steps of transfection and primary screening with selective medium. Optionally, these steps are followed by subcloning to assure purity of cell lines. Cell culture supernatants can be assayed using an antigen capture ELISA to quantify expression levels at all stages of selection and amplification.

[0753] For full-length Spike expression constructs, methanol fixed cells can be screened for internal expression by immunofluorescent staining using a rabbit anti-SARS antibody. Successive measurements at the T75-flask stage of expansion can be employed to assure stability of expression levels. The molecular mass and integrity of the expressed proteins can be checked by PAGE both under native and reducing and denaturing conditions, followed by immunoprobing.

[0754] In one embodiment, the pCMV3 vectors expressing SARS-CoV Spike proteins in either full-length or truncated forms is introduced into CHOK-1 cells using the Trans-LT-1 reagent. On day one, 1×10⁶ cells are plated on 100 mm dishes in non-selective F12 media+10% Fetal Bovine Serum+4 mM Glutamine. On day two, the cells are transfected with a DNA:LT-1 mixture and the media then replaced with complete F12 media. Twenty-four to forty-eight hours later depending on the cell density, each 100 mm dish is split to 4-6 100 mm dishes. The medium is changed to complete selective media containing Geneticin (neomycin) at 500 μg/ml. All bovine serum used in these procedures is from TSE-free sources that meet current FDA standards. Twenty-four hours later the medium is changed to complete selective medium plus 500 ug/ml neomycin. Ten to fourteen days later, individual colonies are picked and transferred to 96 well plates and cultured in complete selective medium but without G418. When approximately 80% of the wells are confluent, twenty-four hour supernatants are screened by spike capture ELISA positive clones are transferred to twenty-four well plates. For the initial expression of full length Spike protein, methanol fixed cells will be screened by immunoflourescent staining using a rabbit anti-SARS antibody. After the low expressing cell lines have been eliminated and there are less than 20-30 cell lines, capture ELISA and westerns will be used to determine the expression level after cell lysis. A portion of each cell line will be pelleted, weighed and lysed in 1% triton lysis buffer containing MOPS, NaCl and MgCl₂ at the same ratio of cell weight to lysis buffer. After lysis the supernatant is collected and expression level is determined. Three to four clones producing the highest levels of spike protein in correct structure and conformation will be grown in three-liter bioreactors for expansion and adaptation to low serum suspension culture conditions for scale-up.

[0755] The antigen capture ELISA assay for the SARS spike protein can be performed as described in the art. A brief description of this assay follows. 96 well flat-bottom plates (Corning, Corning, N.Y.) are coated with 250 ng per well of purified immunoglobulin obtained from rabbit sera that were immunized with inactivated SARS virus. Between steps, the plates are washed in a buffer containing 16% NaCl and 1% Triton X100. 100 μL of supernatant or lysate samples (diluted in a buffer containing 100 mM NaPO₄, 0.1% Casein, 1 mM EDTA, 1% Triton X100, 0.5M NaCl and 0.01% Thiomersal, pH 7.5) are added and incubated for 2 hours at 37° C. Bound antigen is reacted against pooled SARS+ve serum or high affinity monoclonal antibody either human or mouse against SARS spike protein (1 hour incubation, 37° C.) and detected using appropriate species-specific peroxidase conjugated second antibody (30 minute incubation at 37° C.; TAGO, Burlingame, Calif.). The plates are developed for 15 minutes at room temperature using TMB substrate (Pierce, Rockford, Ill.) and the reaction stopped using 4N phosphoric acid. The plates are read at a wavelength of 450 nm and the concentration of protein per ml sample is derived from a standard curve (OD vs. protein concentration) based on serial dilutions of a known concentration of recombinant spike protein.

[0756] The immunoprobing analysis can also be performed following the standard methods described elsewhere in the art. A brief description follows. 10-20 μl of the sample is analyzed on 4-20% SDS PAGE under non-reducing/denaturing conditions with mild heating. The gels are run for 1.5-2.0 hours at 100V constant voltage. The proteins are then transferred onto nitrocellulose membranes (Millipore, Bedford, Mass.) for 45 min using the semidry western transfer system (BioRad, Hercules, Calif.) following the manufacturer's instructions. The membrane is then reacted against polyclonal anti-spike rabbit serum, followed by anti-rabbit Ig conjugated to Alexa 688 (Molecular Probes, Oregon). The blots are scanned using an infrared imaging system (LI-Cor, Inc., Lincoln, Nebr.).

[0757] The highest expressing candidate cell lines can be screened for spike protein expression and stability in small-scale (3 liter) suspension cultures. The candidate clone can be further evaluated for level of expression as well as integrity of expressed protein after amplification, and subsequently tested for expression stability in the absence of selection. The selected clones can also be tested for maintenance of the DNA sequence integrity of the integrated SARS spike protein gene. To quickly monitor the expression levels in small flask (T25 or T75) and in the three liter evaluation cultures, a lectin-based process (Gluvanthus Nivalis lectin) may be used to isolate SARS spike protein to a degree of purity that allows semi-quantitation and characterization of the protein in CHO supernatant. For full-length spike protein, it will be obtained from triton X-100 detergent extracted cells. Full-length Spike protein will be then captured on GNA lectin, followed by hydroxyapatite and SP chromatograph. Eluted protein is then characterized by: 1) polyacrylamide gel electrophoresis (PAGE) and Coomassie staining, 2) Immunoprobing with anti-SARS rabbit sera, 3) structural characterization using size exclusion chromatography (SEC), as well as mass spec analysis using MALDI-TOF.

[0758] Routes and methods of immunization of the vaccines of the invention are discussed in more detail in a section below. Examples 7 to 9 illustrate sample immunization protocols for the recombinant spike proteins.

Vaccine Testing

[0759] Prior to human administration, it is normal to test vaccines in animal models. A mouse model of SARS coronavirus infection is known (Subbarao et al. (2004) J Virol 78:3572-77), and other animals that may be used as models of infection and/or disease include ferrets and monkeys. Thus the invention provides a non-human animal that is infected by the SARS coronavirus, wherein the animal is preferably a ferret or a primate (e.g. a monkey or a macaque). The animal may be gnotobiotic. The animal is preferably not a cat (Felis domesticus). The animal may or may not display SARS disease symptoms e.g. ferrets (Mustela furo) show prominent pulmonary pathology after infection. See: Martina et al. (2003) Nature 425:915.

E. Polynucleotides Encoding the SARS Antigens of the Invention

[0760] The invention includes polynucleotides encoding for the SARS antigens of the invention. In addition, the invention includes polynucleotides which have been optimized for recombinant production (e.g. codon optimization) of the SARS antigens of the invention, including polynucleotides encoding for each of the SARS fusion constructs discussed above.

F. Viral Vector or Viral Particle Delivery of the SARS Antigens of the Invention

[0761] The antigens of the invention may be expressed in vivo or in vitro by polynucleotides encoding the antigens. Expression and delivery of the polynucleotides of the invention may be facilitated via viral vectors and/or viral particles.

[0762] Gene-based delivery systems derived from viruses, such as alphaviruses, are useful for the ex vivo and in vivo administration of heterologous genes, including one or more SARS genes, having therapeutic or prophylactic applications. These systems can also be used for the production of recombinant proteins derived from the SARS virus in cultured cells. Gene-based delivery systems of the invention include viral vectors (e.g., adenovirus vector, poxvirus vector, alphavirus vector) and non-viral nucleic acid vectors (e.g., DNA, RNA) encoding one or more SARS virus antigens. Polynucleotides encoding SARS virus antigen(s) are incorporated into the gene-based vaccines individually or in combination (e.g., as bicistronic constructs).

1. Alphavirus

[0763] Alphaviruses are members of Togaviridae family and share common structural and replicative properties. Sindbis virus (SIN) is the prototype virus for the molecular study of other alphaviruses, and together with Venezuelan equine encephalitis virus (VEE) and Semliki Forest virus (SFV), are the most widely utilized alphaviruses being developed into expression vectors for heterologous genes (Schlesinger and Dubensky (1999) Curr Opin. Biotechnol. 10:434-439; Schlesinger (2001) Expert Opin. Biol. Ther. 1:177-91).

[0764] Alphaviruses possess a relatively small single-stranded RNA genome of positive polarity, which is approximately 12 kb in length, capped and polyadenylated. The RNA interacts with viral capsid protein monomers to form nucleocapsids, which in turn, are surrounded by a host cell-derived lipid envelope from which two viral glycoproteins, E1 and E2, protrude forming “spike” trimers of heterodimeric subunits. Two open reading frames (ORFs) encode as polyproteins the enzymatic nonstructural replicase proteins (5′ ORF) and the virion structural proteins (3′ ORF). The structural polyprotein is translated from a highly abundant subgenomic mRNA, which is transcribed from a strong internal alphavirus promoter (Strauss and Strauss (1994) Microbiol. Rev. 58:491-562). Replication of the genome occurs exclusively within the host cell cytoplasm as RNA.

[0765] The most common alphavirus expression vectors have exploited both the positive-stranded nature and modular organization of the RNA genome. These vectors, termed “replicons” due to their property of self-amplification, permit insertion of heterologous sequences in place of the structural polyprotein genes, while maintaining the 5′- and 3′-end cis replication signals, the nonstructural replicase genes, and the subgenomic junction region promoter (Xiong et al. (1989) Science 243:1188-1191; Liljestrom (1991) Bio/Technology 9:1356-1361). Chimeric alphavirus vectors (and particles) from sequences derived from divergent virus families have also been described. (see, for example U.S. patent application Ser. No. 09/236,140; see also, U.S. Pat. Nos. 5,789,245, 5,842,723, 5,789,245, 5,842,723, and 6,015,694; as well as WO 95/07994, WO 97/38087 and WO 99/18226). Co-owned International Publication WO 02/099035, published Dec. 12, 2002 and incorporated by reference in its entirety herein, describes chimeric alphavirus molecules and modified alphavirus molecules having modified Biosafety Levels.

[0766] The absence of structural protein genes renders alphavirus replicon vectors defective, in that RNA amplification and high-level heterologous gene expression occurs within the target cell, but cell-to-cell spread of vector is not possible due to the inability to form progeny virions. Through the years, several synonymous terms have emerged that are used to describe alphavirus replicon particles. These terms include recombinant viral particle, recombinant alphavirus particle, alphavirus replicon particle and replicon particle. However, as used herein, these terms all refer to a virion-like unit containing an alphavirus-derived RNA vector replicon. Moreover, these terms may be referred to collectively as vectors, vector constructs or gene delivery vectors.

[0767] Packaging of replicon RNA into particles can be accomplished by introducing the replicon RNA into permissive cells (e.g., RNA or DNA transfection, or particle infection) that also contain one or more structural protein expression cassettes or “defective helper” constructs encoding the alphavirus structural proteins. These structural protein encoding constructs may themselves be introduced into the cells by transfection of either RNA or DNA, and most commonly retain the native alphavirus subgenomic promoter, as well as 5′- and 3′-end cis signals for co-amplification with the replicon, but are devoid of any replicase genes and the RNA packaging signal (Liljestrom (1991) Bio/Technology 9:1356-1361; Pushko et al. (1997) Virology 239:389-401; Polo et al. (1999) PNAS 96:4598-4603). Permanent cell lines that are stable transformed with constructs expressing the alphavirus structural proteins (e.g., packaging cell lines) offer a means to avoid transient transfection production methods (Polo et al. (1999) PNAS 96:4598-4603).

[0768] The present invention includes compositions and methods for the production of replication defective viral vector particles (e.g., alphavirus replicon particles) for use in the ex vivo and in vivo administration of heterologous genes encoding proteins having therapeutic or prophylactic application, including genes encoding for one or more SARS viral antigens.

[0769] In one aspect, the invention includes a method of producing replication defective viral vector particles (e.g., alphavirus replicon particles) comprising the steps of introducing at least one nucleic acid molecule comprising a viral vector (e.g., alphavirus replicon RNA) into immortalized cells of the present invention, under conditions that allow for complementation of the viral vector (e.g., alphavirus replicon RNA) and production of viral vector particles (e.g., alphavirus replicon particles), and isolating the viral vector particles from the cells or cell culture supernatants. In certain embodiments, the immortalized cells are grown in suspension, for example PERC.6 cells. In other embodiments, the methods are performed in large-scale volumes, for example, liter volumes or greater, such as for example in roller bottles, large flasks, Nunc Cell Factories, Corning Cell Cubes, fermentation vessels, etc).

[0770] In certain embodiments, the viral vector is an alphavirus replicon RNA that requires complementation by providing one or more alphavirus structural proteins in trans, within the immortalized cell. In such instances, the methods of complementation to produce alphavirus replicon particles may involve the introduction of one or more nucleic acids (e.g., RNA, DNA) encoding said alphavirus structural protein(s) (e.g., capsid and/or envelope glycoproteins) into the immortalized cells, either transiently or stably, and either concurrent with or prior to the introduction of the alphavirus replicon RNA. In certain embodiments, the alphavirus replicon RNA is introduced into the cell by transfection an in vitro transcribed RNA. In other embodiments, the alphavirus replicon RNA is introduced into the cell by transfection of a DNA (e.g., ELVIS), which is capable of transcribing within the cell, the replicon RNA. In yet other embodiments, the alphavirus replicon RNA is introduced into the cell by infection with a seed stock of alphavirus replicon particles. In certain embodiments, the nucleic acids encoding said alphavirus structural protein(s) are defective helper RNA or are DNA that can transcribe within the cell defective helper RNAs.

[0771] As discussed herein, “alphavirus RNA replicon vector”, “RNA replicon vector”, “replicon vector” or “replicon” refers to an RNA molecule that is capable of directing its own amplification or self-replication in vivo, within a target cell. To direct its own amplification, the RNA molecule should encode the polymerase(s) necessary to catalyze RNA amplification (e.g., alphavirus nonstructural proteins nsP1, nsP2, nsP3, nsP4) and also contain cis RNA sequences required for replication which are recognized and utilized by the encoded polymerase(s). An alphavirus RNA vector replicon should contain the following ordered elements: 5′ viral or cellular sequences required for nonstructural protein-mediated amplification (may also be referred to as 5′ CSE, or 5′ cis replication sequence, or 5′ viral sequences required in cis for replication, or 5′ sequence which is capable of initiating transcription of an alphavirus), sequences which, when expressed, code for biologically active alphavirus nonstructural proteins (e.g., nsP1, nsP2, nsP3, nsP4), and 3′ viral or cellular sequences required for nonstructural protein-mediated amplification (may also be referred as 3′ CSE, or 3′ viral sequences required in cis for replication, or an alphavirus RNA polymerase recognition sequence). The alphavirus RNA vector replicon also should contain a means to express one or more heterologous sequence(s), such as for example, an IRES or a viral (e.g., alphaviral) subgenomic promoter (e.g., junction region promoter) which may, in certain embodiments, be modified in order to increase or reduce viral transcription of the subgenomic fragment, or to decrease homology with defective helper or structural protein expression cassettes, and one or more heterologous sequence(s) to be expressed. Preferably the heterologous sequence(s) comprises a protein-encoding gene, which is the 3′ proximal gene within the vector replicon. And preferably the replicon further comprises a polyadenylate tract.

[0772] As discussed herein, “recombinant Alphavirus Particle”, “alphavirus replicon particle” and “replicon particle” refers to a virion-like unit containing an alphavirus RNA vector replicon. Generally, the recombinant alphavirus particle comprises one or more alphavirus structural proteins, a lipid envelope and an RNA vector replicon. Preferably, the recombinant alphavirus particle contains a nucleocapsid structure that is contained within a host cell-derived lipid bilayer, such as a plasma membrane, in which one or more alphaviral envelope glycoproteins (e.g., E2, E1) are embedded. The particle may also contain other components (e.g., targeting elements such as biotin, other viral structural proteins or portions thereof, hybrid envelopes, or other receptor binding ligands), which direct the tropism of the particle from which the alphavirus was derived. Generally the interaction between alphavirus RNA and structural protein(s) necessary to efficiently form a replicon particle or nucleocapsid may be an RNA-protein interaction between a capsid protein and a packaging signal or packaging sequence contained within the RNA.

[0773] “Alphavirus packaging cell line” refers to a cell which contains one or more alphavirus structural protein expression cassettes and which produces recombinant alphavirus particles (replicon particles) after introduction of an alphavirus RNA vector replicon, eukaryotic layered vector initiation system, or recombinant alphavirus particle. The parental cell may be of mammalian or non-mammalian origin. Within preferred embodiments, the packaging cell line is stably transformed with the structural protein expression cassette(s).

[0774] “Defective helper RNA” refers to an RNA molecule that is capable of being amplified and expressing one or more alphavirus structural proteins within a eukaryotic cell, when that cell also contains functional alphavirus nonstructural “replicase” proteins. The alphavirus nonstructural proteins may be expressed within the cell by an alphavirus RNA replicon vector or other means. To permit amplification and structural protein expression, mediated by alphavirus nonstructural proteins, the defective helper RNA molecule should contain 5′-end and 3′-end RNA sequences required for amplification, which are recognized and utilized by the nonstructural proteins, as well as a means to express one or more alphavirus structural proteins. Thus, an alphavirus defective helper RNA should contain the following ordered elements: 5′ viral or cellular sequences required for RNA amplification by alphavirus nonstructural proteins (also referred to elsewhere as 5′ CSE, or 5′ cis replication sequence, or 5′ viral sequences required in cis for replication, or 5′ sequence which is capable of initiating transcription of an alphavirus), a means to express one or more alphavirus structural proteins, gene sequence(s) which, when expressed, codes for one or more alphavirus structural proteins (e.g., C, E2, E1), 3′ viral or cellular sequences required for amplification by alphavirus nonstructural proteins (also referred to as 3′ CSE, or 3′ viral sequences required in cis for replication, or an alphavirus RNA polymerase recognition sequence), and a preferably a polyadenylate tract. Generally, the defective helper RNA should not itself encode or express in their entirety all four alphavirus nonstructural proteins (nsP1, nsP2, nsP3, nsP4), but may encode or express a subset of these proteins or portions thereof, or contain sequence(s) derived from one or more nonstructural protein genes, but which by the nature of their inclusion in the defective helper do not express nonstructural protein(s) or portions thereof. As a means to express alphavirus structural protein(s), the defective helper RNA may contain a viral (e.g., alphaviral) subgenomic promoter which may, in certain embodiments, be modified to modulate transcription of the subgenomic fragment, or to decrease homology with replicon RNA, or alternatively some other means to effect expression of the alphavirus structural protein (e.g., internal ribosome entry site, ribosomal readthrough element). Preferably an alphavirus structural protein gene is the 3′ proximal gene within the defective helper. In addition, it is also preferable that the defective helper RNA does not contain sequences that facilitate RNA-protein interactions with alphavirus structural protein(s) and packaging into nucleocapsids, virion-like particles or alphavirus replicon particles. A defective helper RNA is one specific embodiment of an alphavirus structural protein expression cassette.

[0775] Alphavirus for use in the invention may be grown in any one of the cell lines discussed above as suitable for the SARS virus.

[0776] Alphavirus replicon particles may be produced according to the present invention by using the above cell lines (e.g., immortalized cell lines) and a variety of published and accepted alphavirus vector methodologies. Such methodologies include, for example, transient packaging approaches, such as the co-transfection of in vitro transcribed replicon and defective helper RNA(s) (Liljestrom, Bio/Technology 9:1356-1361, 1991; Bredenbeek et al., J. Virol. 67:6439-6446, 1993; Frolov et al., J. Virol. 71:2819-2829, 1997; Pushko et al., Virology 239:389-401, 1997; U.S. Pat. Nos. 5,789,245 and 5,842,723) or co-transfection of plasmid DNA-based replicon and defective helper construct(s) (Dubensky et al., J. Virol. 70:508-519, 1996), as well as introduction of alphavirus structural protein expression cassettes (e.g., DNA-based defective helper) into immortalized cell lines of the present invention to create stable packaging cell lines (PCL) (Polo et al., PNAS 96:4598-4603, 1999; U.S. Pat. Nos. 5,789,245, 5,842,723, 6,015,694; WO 97/38087, WO 99/18226, WO 00/61772, and WO 00/39318). Stable packaging cell lines may then be utilized for alphavirus replicon particle production. The PCL may be transfected with in vitro transcribed alphavirus replicon RNA, transfected with a plasmid DNA-based replicon (e.g., ELVIS vector), or infected with a seed stock of alphavirus replicon particles, and then incubated under conditions and for a time sufficient to produce progeny alphavirus replicon particles in the culture supernatant. In addition, progeny replicon particles can subsequently be passaged in additional cultures of naive PCL by infection, resulting in further expansion and commercial scale preparations. Importantly, by using defective helper RNA or stable PCL based on the “split” structural gene configuration, these replicon particle stocks may be produced free from detectable contaminating RCV.

[0777] Following harvest, crude culture supernatants containing the chimeric alphavirus replicon particles may be clarified by passing the harvest through a filter (e.g., 0.2 uM, 0.45 uM, 0.65 uM, 0.8 uM pore size). Optionally, the crude supernatants may be subjected to low speed centrifugation prior to filtration to remove large cell debris. Within one embodiment, an endonuclease (e.g., Benzonase, Sigma #E8263) is added to the preparation of alphavirus replicon particles before or after a chromatographic purification step to digest exogenous nucleic acid. Further, the preparation may be concentrated prior to purification using one of any widely known methods (e.g., tangential flow filtration). Crude or clarified alphavirus replicon particles may be concentrated and purified by chromatographic techniques (e.g., ion exchange chromatography, size exclusion chromatography, hydrophobic interaction chromatography, affinity chromatography), such as those described in WO01/92552, incorporated by reference in its entirety herein. Two or more such purification methods may be performed sequentially.

### Example of Alphavirus Replicon Particles Encoding SARS Virus Spike (S) Antigen

[0778] The invention includes compositions and methods for the production of replication defective viral vector particles (e.g., alphavirus replicon particles) for use in the ex vivo and in vivo administration of heterologous genes encoding proteins having therapeutic or prophylactic application, including genes encoding for one or more SARS viral antigens.

[0779] The following example illustrates a method of preparing alphavirus replicon particles encoding SARS virus spike (s) antigen.

[0780] The SARS virus spike gene can be incorporated into alphavirus replicon particles derived from a variety of alphavirus, such as Sindbis virus, Semliki Forest virus (U.S. Pat. No. 5,739,026), Venezuelan equine encephalitis virus (U.S. Pat. No. 6,531,135), and replicon particle chimeras derived from more than one alphavirus (U.S. Pat. No. 6,376,236, WO 02/99035). In addition, the SARS virus spike gene can be incorporated in its entirety (encoding full-length spike protein) or in a modified form that includes, for example, sequence deletions or truncations, such that the encoded a spike protein is of less than full-length (e.g., C-terminal truncation of one or more (e.g. at least 1, 2, 3, 4, 5, 6, 7, 8, 9, 10, 15, 20, 25, 30 etc.) amino acids, deleted of transmembrane region and cytoplasmic tail).

[0781] For example, the spike gene may be cloned as a full-length gene into the VCR-chim2.1 vector (WO 02/99035) by standard RT-PCR conditions or by standard subcloning from one of the other plasmids described herein, using commercially available restriction endonucleases. For the reverse transcription step in standard RT-PCR, the Superscript pre-amplification kit (Invitrogen™) and the primer SEQ ID NO: 7325 (sp-RT-R) are used:

[0782] For the amplification step, the cDNA polymerase advantage kit (Clonetech) and two primers Sp-F-BbvCI (SEQ ID NO: 7326) and Sp-R-NotI (SEQ ID NO: 7327) are used:

[0783] The forward primer is designed to contain the ccacc sequence (Kozak, 1991 JBC 19867-70) in front of the ATG codon to optimize translation efficiency of the spike gene. Also, the forward primer contains the BbvCI restriction site and the reverse primer contains the NotI restriction site for subsequent cloning of the PCR amplified gene.

[0784] The PCR product is purified using the QIAquick Nucleotide Removal kit (QIAgen), digested with BbvCI and NotI, gel purified with QIAquick Gel Extraction kit (QIAgen), and ligated to plasmid VCR-Chim2.1 pre-digested with the same enzymes. Clones containing the SARS spike sequence are verified by sequencing and the new construct is called VCR-Chim2.1-SARSspike.

[0785] To generate VEErep/SINenv-SARSspike replicon particles the plasmids VCR-Chim2.1-SARSspike, VCR-DH-Scap (WO 02/99035), and VCR-DH-Sglyd1160 (WO 02/99035) are linearized with the restriction enzyme PmeI and used for in vitro transcription as described previously (Polo et al. 1999, PNAS 96: 4598-603; WO02/99035). The transcripts are co-transfected into BHK cells as previously described (Polo et al., 1999, ibid.; WO02/99035). The transfected cells are incubated at 34° C., the supernatants collected at 20 and 30 hrs post-electroporation, clarified by centrifugation, and purified by chromatography as previously described (WO 01/92552).

[0786] Expression of the SARS spike protein from the replicon particle vector is verified by infecting BHK cells overnight with purified VEErep/SINenv-SARSspike or VEErep/SINenv-GFP (WO 02/99035) replicon particles. In addition, BHK cells also were transfected in parallel with in vitro transcribed VCR-Chim2.1-SARSspike replicon RNA. At 16 hrs post-infection and transfection cells are lysed and a sample of the lysate analyzed by western blot using an antibody that recognizes SARS virus spike protein. The proteins on the gel are stained or transferred to a membrane for Western blot analysis with sera from convalescent patients or alternatively murine or rabbit antisera generated against SARS virus. VEErep/SINenv-SARSspike replicon particles are administered to the vaccine recipient (e.g., rodent, non-human primate, human) as described elsewhere in the present invention.

[0787] FIG. 67 shows data from western blot analysis performed under non-reducing conditions, using a SARS virus specific rabbit polyclonal antisera. The western data demonstrate that not only is SARS spike protein expressed in cells infected with alphavirus replicon particles or transfected with replicon RNA, but the predominant form of spike is that of a homotrimer (FIG. 67A). Similar homotrimeric association of the spike protein was observed in western blots of SARS virions purified from SARS virus infected VERO cell supernatants, and this homotrimer is heat labile, as indicated by the dissociation into monomeric forms at 80° C. and 100° C. (FIG. 67B).

[0788] To further characterize SARS Spike protein expression and processing following expression from alphavirus replicon vectors, BHK-21 cells were infected with alphavirus replicon particles expressing the full-length Spike. At 6 hr post-infection with an MOI of 5, infected cells were labeled for 1 hr with L-[³⁵S]methionine/cysteine and chased for the indicated time. The [³⁵S]-labeled spike protein was immunoprecipitated by anti-SARS rabbit serum and digested with Endo-H. Both digested and undigested proteins were analysed by 4% polyacrylamide-SDS PAGE under reducing conditions. As shown in FIG. 55, the full-length spike protein is synthesized as an Endo-H sensitive high mannose glycoprotein (gp170, an ER form) that undergoes modification to an Endo-H resistant glycoprotein with complex oligosaccharides (gp180, a Golgi form). The conversion of gp170 into the gp180 form takes place within 2 hr.

[0789] Alphavirus replicon particles expressing one or more SARS proteins (e.g., VEErep/SINenv-SARSspike replicon particles) are administered to the vaccine recipient in order to induce a SARS specific immune response (e.g., rodent, ferret, non-human primate, human) as described elsewhere in the present invention. Immunization may be performed through a variety of routes, including for example, intramuscular, subcutaneous, intradermal, and intranasal. In additon, the alphavirus replicon particles may be used alone or in combination (e.g., “prime-boost”) with other vaccine approaches of the present invention, or alternatively the alphavirus replicon particles may co-express antigen from other respiratory pathogens or be co-administered in combination with alphavirus replicon particles expressing antigens from other respiratory pathogens (e.g., influenza virus, parainfluenza virus, respiratory syncytial virus, human metapneumovirus). For example, the induction of anti-spike protein antibodies in animals immunized IM with VEErep/SINenv-SARSspike replicon particles was demonstrated in mice (FIG. 68). These mouse studies also included addtional vaccine groups for comparison, including the inactivated SARS virus and recombinant truncated spike protein vaccines describe elsewhere herein, as well as plasmid DNA used as a prime, followed by alphavirus replicon particles as a boost. The data clearly show very potent immune responses for all vaccine groups, including the alphavirus replicon particle group. It should be noted that the level of antibody induced by the inactivated SARS virus vaccine used in these experiments has been shown to be protective in a SARS virus animal challenge model.

[0790] Similarly, genes encoding other SARS virus antigens (e.g., nucleocapsid protein, membrane glycoprotein) are cloned into alphavirus replicon vectors, either individually or in combination, to generate alphavirus replicon particles according to the teachings of the present invention and using standard molecular biology techniques.

### Example of Alphavirus-Based Plasmid DNA Expressing SARS Virus Spike (S)

[0791] The invention includes preparation of plasmid DNA expressing a SARS virus antigen for prophylactic or therapeutic immunization against SARS virus infection. In one embodiment, the SARS viral antigen is a spike (S) protein. In one embodiment, the plasmid DNA is alphavirus-based.

[0792] The following example illustrates one method for preparing an alphavirus-based plasmid DNA expressing SARS virus spike (S).

[0793] SARS spike gene can be delivered using any of the alphavirus-based plasmid DNA replicons such as ELVS (Dubensky et al, 1996 J Virol. 70: 508-19), SINCP (WO 01/81609), or VCP (PCT WO 02/99035).

[0794] For example, the SARS spike gene is cloned into SINCP using the standard RT-PCR techniques. The oligo Sp-RT-R is used for the reverse transcription step with the Superscript pre-amplification kit (Invitrogen). For the amplification step, the cDNA polymerase advantage kit (Clonetech) with the Sp-R-NotI and Sp-F-XhoI (SEQ ID NO: 7328) primers is used.

[0795] The Sp-F-XhoI primer was designed to contain the ccacc sequence in front of the ATG codon to optimize translation efficiency (Kozak 1991, ibid) of the spike gene. Also, the primer contains the XhoI restriction site for the subsequent cloning of the PCR amplified gene.

[0796] The PCR product is purified using the QIAquick Nucleotide removal kit, digested with XhoI and NotI, gel purified with QIAquick Gel Extraction kit, and ligated to plasmid SINCP pre-digested with the same enzymes. Clones containing the SARS spike sequence are verified by sequencing and the new construct is called SINCP-SARSspike.

[0797] Expression of the SARS spike gene is verified by transient transfection of BHK cells with 2 μg of either plasmid DNA SINCP-SARSspike or SINCP pre-incubated for 5 minutes with 5 μl of TransIT Polyamine reagent (Mirrus) in low serum medium Optimem (Life Technologies). At 48 hrs pos-transfection cells are lysed and a sample of the lysate is run on 8% SDS-PAGE. The proteins on the gel are either stained or transferred to a membrane for Western blot analysis with sera from convalescent patients, or alternatively with sera from mouse or rabbits.

[0798] SINCP-SARSspike plasmid replicon is administered to the vaccine recipient (e.g., rodent, non-human primate, human) as a formulated or unformulated plasmid vaccine, alone or in combination (e.g., “prime-boost”) with other vaccines of the present invention, as described elsewhere herein.

[0799] Similarly, genes encoding other SARS virus antigens (e.g., nucleocapsid protein, membrane glycoprotein) are cloned into alphavirus plasmid replicon vectors.

2. Plasmid Expression Vectors

### Example of Plasmid DNA Expressing SARS Virus Spike (S)

[0800] The following example illustrates a method for preparing plasmid DNA expressing SARS virus spike (s).

[0801] The SARS virus spike antigen also may be delivered using other plasmid DNA expression vectors (sometimes referred to as “conventional” DNA vaccines), based on a polymerase II promoter, such as, for example, a CMV promoter. A DNA vaccine of the spike antigen gene induces an antibody response in mice (Zhao et al. (2004) Acta Biochim et Biophysica Sinica 36:37-41), and has been found to induce viral neutralization and protective immunity in mice (Yang et al. (2004) Nature 428:561-564), particularly when truncated at the C-terminus.

[0802] For example, the SARS spike gene is cloned into pCMVKm2 (Zur Megede et al., J. Virol., 74:2628-2635, 2000; SEQ ID NO: 9923) using standard RT-PCR techniques. The oligo Sp-RT-R is used for the reverse transcription step with the Superscript pre-amplification kit (Invitrogen). For the amplification step, the cDNA polymerase advantage kit (Clonetech) is used with primers Sp-F-EcoRI (SEQ ID NO: 7329) and Sp-R-XbaI (SEQ ID NO: 7330).

[0803] The forward primer was designed to contain the CCACC (SEQ ID NO: 7331) sequence in front of the ATG codon to optimize translation efficiency (Kozak 1991, ibid.) of the spike gene. Also, the forward primer contains the EcoRI restriction site and the reverse primer contains the XbaI restriction site for the subsequent cloning of the PCR amplified gene.

[0804] The PCR product is purified using the QIAquick Nucleotide Removal kit, digested with XhoI and NotI, gel purified with QIAquick Gel Extraction kit, and ligated to plasmid pCMVKm2 pre-digested with the same enzymes. Clones containing the SARS spike sequence are verified by sequencing and the new construct is called pCMVKm2-SARSspike.

[0805] Expression of the SARS spike gene is verified by transient transfection of BHK or 293 cells with 2 μg of either plasmid DNA pCMVKm2-SARSspike or pCMVKm2 pre-incubated for 5 minutes with 5 μl of TransIT Polyamine reagent (Mirrus) in low serum medium Optimem (Life Technologies). At 48 hrs pos-transfection cells are lysed and a sample of the lysate is run on 8% SDS-PAGE. The proteins on the gel are either stained or transferred to a membrane for Western blot analysis with sera from convalescent patients, or alternatively using mouse or rabbit antisera.

[0806] Plasmid pCMVKm2-SARSspike is administered to the vaccine recipient (e.g., rodent, non-human primate, human) as a formulated or unformulated plasmid vaccine, as described elsewhere in the present invention.

[0807] Similarly, genes encoding other SARS virus antigens (e.g., nucleocapsid protein, membrane glycoprotein) are cloned into plasmid expression vectors

3. Virus-Like Particles Comprising SARS Antigens

[0808] The SARS viral antigens of the invention may be formulated into Virus Like Particles (“VLPs”). The invention thus includes virus-like particles (or VLPs) comprising one or more SARS viral antigens. Preferably, the VLPs comprise one or more SARS viral antigens selected from the group consisting of Spike (S), nucleocapsid (N), membrane (M) and envelope (E). Preferably, the VLPs comprise at least M and E.

[0809] The VLPs of the invention comprise at least one particle-forming polypeptide. Said particle-forming polypeptide is preferably selected from a Coronavirus structural protein. In one embodiment, the particle-forming polypeptide is selected from one or more SARS viral antigens. In another embodiment, the particle-forming polypeptide is selected from the structural protein of a non-SARS Coronavirus, such as, for example, Mouse Hepatitis Virus.

[0810] VLPs can be formed when viral structural proteins are expressed in eukaryotic or prokaryotic expression systems. Upon expression, the structural proteins self-assemble to form particles. Alternatively, viral structural proteins may be isolated from whole virus and formulated with phospholipids. Such viral structural proteins are referred to herein as “particle-forming polypeptides”. VLPs are not infectious because no viral genome is present, however, these non-replicating, virus capsids mimic the structure of native virions.

[0811] Due to their structure, VLPs can display a large number of antigenic sites on their surface (similar to a native virus). VLPs offer an advantage to live or attenuated vaccines in that they are much safer to both produce and administer, since they are not infectious. VLPs have been shown to induce both neutralizing antibodies as well as T-cell responses and can be presented by both class I and II MHC pathways.

[0812] Previous work creating VLPs from coronavirus indicates that E and M proteins along may be sufficient for coronavirus VLP formation. See Fischer et al., J. Virol. (1998) 72:7885-7894 and Vennema et al. EMBO J. (1996) 15:2020-2028.

[0813] Chimeric VLPs comprising particle-forming polypeptides or portions thereof from non-SARS Coronaviruses are also included in the invention. Such particle-forming polypeptides may comprise a full length polypeptide from a non-SARS Coronavirus. Alternatively, a particle-forming fragment may be used.

[0814] In one embodiment, a fragment of a non-SARS particle-forming polypeptide and a fragment of a SARS viral antigen are fused together. For instance, such chimeric polypeptides may comprise the the endodomain and transmembrane domain of a non-SARS particle-forming polypeptide and the ectodomain of a SARS viral antigen. In one example, the VLPs of the invention comprise a chimeric spike protein comprising an endodomain and transmembrane domain of the spike protein of Mouse Hepatitis Virus (MHV) and the chimeric spike protein further comprises the ectodomain of the SARS spike protein. Such VLPs may further comprise Coronavirus M and E proteins. Said M and E proteins may be selected from any coronavirus, including Mouse Hepatitis Virus (MHV) or SARS. Sample sequences of S, M and E proteins of MHV are included in the figures, supra.

[0815] Chimeric spike proteins derived from the ectodomain of feline infectious peritonitis virus (FIPV) spike protein fused to the endo and transmembrane domains of MHV spike protein have been previously disclosed. See WO 98/49195 and WO 02/092827. In these chimeric VLP structures, the capsid structure of the VLPs is formed by the M and E protein of MHV. The chimeric spike protein provides for the surface exposure of the ectodomain of the FIPV spike protein.

[0816] As used herein, the term “virus-like particle” or “VLP” refers to a non-replicating, empty virus shell. VLPs are generally composed of one or more viral proteins, such as, but not limited to those proteins referred to as capsid, coat, shell, surface and/or envelope proteins, or particle-forming polypeptides derived from these proteins. VLPs can form spontaneously upon recombinant expression of the protein in an approrpirate expression system. Alternatively, viral structural proteins may be isolated from whole virus and formulated with phospholipids. Methods for producing particular VLPs are known in the art and discussed more fully below. The presence of VLPs in a composition can be detected using conventional techniques known in the art, such as by electron microscopy, x-ray crystallography, and the like. See, e.g., Baker et al., Biophys. J. (1991) 60:1445-1456; Hagensee et al., J. Virol. (1994) 68:4503-4505. For example, cryoelectron microscopy can be performed on vitrified aqueous samples of the VLP preparation in question, and images recorded under appropriate exposure conditions.

[0817] The phrase “particle-forming polypeptide” includes a full-length or near full-length viral protein, as well as a fragment thereof, or a viral protein with internal deletion, which has the ability to form VLPs under conditions that favor VLP formation. Accordingly, the polypeptide may comprise the full-length sequence, fragments, truncated and partial sequences, as well as analogs and precursor forms of the reference molecule. The term therefore includes deletions, additions and substitutions to the sequence, so long as the polypeptide retains the ability to form a VLP. Thus, the term includes natural variations of the specified polypeptide since variations in coat proteins often occur between viral isolates. The term also includes deletions, addition and substitutions that do not naturally occur in the reference protein, so long as the protein retains the ability to form a VLP.

[0818] Preferred substitutions are those which are conservative in nature, i.e., those substitutions that take place within a family of amino acids that are related in their side chains. Specifically, amino acids are generally divided into four families: (1) acidic: aspartate and glutamate; (2) basic: lysine, arginine, and histidine; (3) non-polar: alanine, valine, leucine, isoleucine, proline, phenylalanine, methionine, tryptophan; and (4) uncharged polar: glycine, asparagine, glutamine, cystine, serine, theronine, tyrosine. Phenylalanine, tryptophan, and tyrosine are sometimes classified as aromatic amino acids. For example, it is reasonably predictable that an isolated replacement of leucine with isoleucine or valine, an asparate with a glutamate, a threonine with a serine, or a similar conservative replacement of an amino acid with a structurally related amino acid, will not have a major effect on the biological activity. Proteins having substantially the same amino acid sequence as the reference molecule, but possessing minor amino acid substitutions that do not substantially affect the immunogenicity of the protein, are therefore within the definition of the reference polypeptide.

[0819] The VLPs of the invention can be formed from any viral protein, particle-forming polypeptide derived from the viral protein, or combination of viral proteins or fragments thereof, that have the capability of forming particles under appropriate conditions. The requirements for the particle-forming viral proteins are that if the particle is formed in the cytoplasm of the host cell, the protein must be sufficiently stable in the host cell in which it is expressed such that formation of virus-like structures will result, and that the polypeptide will automatically assemble into a virus-like structure in the cell of the recombinant expression system used. If the protein is secreted into culture media, conditions can be adjusted such that VLPs will form. Furthermore, the particle-forming protein should not be cytotoxic in the expression host and should not be able to replicate in the host in which the VLP will be used.

[0820] Preferred particle-forming polypeptides include coronavirus M and E proteins, preferably SARS M and E proteins.

[0821] Methods and suitable conditions for forming particles from a wide variety of viral proteins are known in the art. VLPs have been produced, for example from proteins derived from influenza virus (such as HA or NA), Hepatitis B virus (such as core or capsid proteins), Hepatitis E virus, measles virus, Sindbis virus, Rotavirus, Foot-and-Mouth Disease virus, Retrovirus, Norwalk virus, human Papilloma virus, HIV, RNA-phages, Qβ-phage (such as coat proteins), GA-phage, fr-phage, AP205 phage, and Ty (such as retrotransposon Ty protein p1). VLPs are discussed further in WO 03/024480, WO 03/024481, and Niikura et al., Virology (2002) 293:273-280; Lenz et al., J. Immunology (2001) 5246-5355; Pinto, et al., J. Infectious Diseases (2003) 188:327-338; and Gerber et al., J. Virology (2001) 75(10):4752-4760.

[0822] As explained above, VLPs can spontaneously form when the particle-forming polypeptide of interest is recombinantly expressed in an appropriate host cell. Thus, the VLPs for use in the present invention may be prepared using recombinant techniques, well known in the art. In this regard, genes encoding the particle-forming polypeptide in question can be isolated from DNA libraries or directly from cells and tissues containing the same, using known techniques. The genes encoding the particle-forming polypeptides can also be produced synthetically, based on the known sequences. The nucleotide sequence can be designed with the appropriate codons for the particular amino sequence desired. In general, one will select preferred codons for the intended host in which the sequence will be expressed (e.g. human codons for human DNA vaccines). The complete sequence is generally assembled from overlapping oligonucleotides prepared by standard methods and assembled into a complete coding sequence. See., e.g., Edge, Nature (1981) 292:756; Nambair et al. Science (1984) 223:1299; Jay et al., J. Biol. Chem. (1984) 259:6311.

[0823] Once the coding sequences for the desired particle-forming polypeptides have been isolated or synthesized, they can be cloned into any suitable vector or replicon for expression. Numerous cloning vectors are known to those of skill in the art, and the selection of an appropriate cloning vector is a matter of choice. See, generally, Sambrook et al. The vector is then used to transform an appropriate host cell. Suitable expression systems include, but are not limited to, bacterial, mammalian, bacuolvirus/insect, vaccinia, Semliki Forest virus (SFV), yeast, and Xenopus expression systems, well known in the art.

[0824] A number of cell lines suitable for use as host cells for producing the VLPs of the invention are known in the art. Suitable mammalian cell lines include, but are not limited to, Chinese Hamster Ovary (CHO) cells, HeLa cells, baby hamster kidney (BHK) cells, monkey kidney cells (COS), human hepatocellular carcinoma cells (e.g., Hep G2), Madin-Darby bovine kidney (“MDBK”) cells, as well as others. Mammalian sources of cells include, but are not limited to, human or non-human primate (e.g., MRC-5 (ATCC CCL-171), WI-38 (ATCC CCL-75), HUH, human embryonic kidney cells (293 cells, typically transformed by sheared adenovirus type 5 DNA), VERO cells from monkey kidneys (including, for example COS7 cells), horse, cow (e.g., MDBK cells), sheep, dog (e.g., MDCK cells from dog kidneys, ATCC CCL34 MDCK (NBL2) or MDCK 33016, deposit number DSM ACC 2219 as described in WO 97/37001), cat, and rodent (e.g., hamster cells such as BHK21-F, HKCC cells, or Chinese hamster ovary cells (CHO cells)), and may be obtained from a wide variety of developmental stages, including for example, adult, neonatal, fetal, and embryo.

[0825] Bacterial hosts suitable for production of VLPs of the invention include E. coli, Bacillus subtilis, and Streptoccocus spp. Yeast hosts suitable for production of VLPs of the invention include Saccharomyces cerevisiae, Candida albicans, Candida maltosa, Hansenula polymorpha, Kluyveromyces fragilis, Kluyveromyces lactis, Pichia guillerimondii, Pichia pastoris, Schizosaccharomyces pombe and Yarrowia lipolytica. Insect cells suitable for production of VLPs of the invention (i.e., via baculovirus expression vectors) include Aedes aegypti, Autographa californica, Bombyx mori, Drosophila melanogaster, Spodptera frugiperda, and Trichoplusia ni.

[0826] Viral vectors can be used for the production of particles in eukaryotic cells, such as those derived from the pox family of viruses, including vaccinia virus and avian poxvirus. Additional, vaccinia based infection/transfection systems, such as those as described in Tomei et al., J. Virol (1993) 67:4017-4026 and Selby et al., J. Gen. Virol. (1993) 74:1103-1113, can also be used to generate the VLPs of the invention. In this system, cells are first transfected in vitro with a vaccinia virus recombinant that encodes the bacteriophage T7 RNA polymerase. This polymerase only transcribes templates bearing T7 promoters. Following infection, cells are transfected with the DNA of interest, driven by a T7 promoter. The polymerase expressed in the cytoplasm from the vaccinia virus recombinant transcribes the transfected DNA into RNA which is then translated into protein by the host translation machinery. The method provides for high level, transient, cytoplasmic production of large quantities of RNA and its translation products.

[0827] Depending on the expression system and host selected, the VLPs are produced by growing host cells transformed by an expression vector under conditions whereby the particle-forming polypeptide is expressed and VLPs can be formed. The selection of the appropriate growth conditions is within the skill of the art. If the VLPs are formed intracellularly, the cells are then disrupted, using chemical, physical or mechanical means, which lyse the cells yet keep the VLPs substantially intact. Such methods are known the those of skill in the art and are described in, e.g., Protein Purification Applications: A Practical Approach, (E. L. V. Harris and S. Angal, Eds., 1990).

[0828] The particles are then isolated using methods that preserve the integrity thereof, such as by gradient centrifugation, e.g., cesium chloride (CsCl) and sucrose gradients, and the like (see, e.g., Kirnbauer et al., J. Virol. (1993) 67:6929-6936), ion exchange chromatography (including anion exchange chromatography such as DMAE and TMAE), hydroxyapatitie chromatography (see WO 00/09671), hydrophobic interaction chromatography, gel filtration chromatography and other filtration methods such as nanometric filtration and ultrafiltration. Preferably at least one anion exchange step is performed during purification, and more preferably at least two anion exchange steps are used.

[0829] VLP formulations of the invention may be further processed by methods known in the art to disassemble the VLPs into smaller, protein containing moieties using a high concentration of reducing agent, followed by reassembly of the VLPs by either removal of the reducing agent or by addition of excess oxidant. The resulting reassembled VLPs may have improved homogeneity, stability and immunogenic properties. In addition, further therapeutic or prophylactic agents may be formulated into the VLPs upon reassembly. See McCarthy et al., J. Virology (1998) 72(1):32-41. See also WO 99/13056 and WO 01/42780. Reducing agents suitable for use in VLP disassembly include sulfhydryl reducing agents (such as glutathion, beta mercaptoethanol, dithiothreitol, dithioerythritol, cysteine, hydrogen sulfide and mixtures thereof) preferably contained in moderate to low ionic strength buffers. Sufficient exposure time of the VLPs to the reducing agent will be required to achieve a suitable amount of VLP disassembly.

[0830] Adjuvants may be added to the VLPs of the invention to enhance the immunogenicity of the SARS viral antigens. Antigens suitable for use with VLPs include those described, supra. For example, the VLPs of the invention may be adsorbed onto an aluminum adjuvant.

[0831] The VLPs of the invention may formulated to enhance their stability. Additional components which may enhance the stability of a VLP formulation include salts, buffers, non-ionic surfactants and other stabilizers such as polymeric polyanion stabilizers. See WO 00/45841.

[0832] The ionic strength of a solution comprising VLP particles may be maintained by the presence of salts. Almost any salt which can contribute to the control of the ionic strength may be used. Preferred salts which can be used to adjust ionic strength include physiologically acceptable salts such as NaCl, KCl, Na₂SO₄, (NH₄)₂SO₄, sodium phosphate and sodium citrate. Preferably, the salt component is present in concentrations of from about 0.10 M to 1 M. Very high concentrations are not preferred due to the practical limitations of parenteral injection of high salt concentrations. Instead, more moderate salt concentrations, such as more physiological concentrations of about 0.15M to about 0.5M with 0.15M-0.32M NaCl are preferred.

[0833] Buffers may also be used to enhance the stability of the VLP formulations of the invention. Preferably, the buffer optimizes the VLP stability while maintaining the pH range so that the vaccine formulation will not be irritating to the recipient. Buffers preferably maintain the pH of the vaccine formulation within a range of p/H 5.5-7.0, more preferably 6.0-6.5. Buffers suitable for vaccine formulations are known in the art and include, for example, histidine and imidazole. Preferably, the concentration of the buffer will range from about 2 mM to about 100 mM, more preferably 5 mM to about 20 mM. Phosphate containing buffers are generally not preferred when the VLP is adsorbed or otherwise formulated with an aluminum compound.

[0834] Non-ionic surfactants may be used to enchance the stability of the VLP formulations of the invention. Surfactants suitable for use in vaccine formulations are known in the art and include, for example, polyoxyethylene sorbital fatty acid esters (Polysorbates) such as Polysorbate 80 (e.g., TWEEN 80), Polysorbate 20 (e.g., TWEEN 20), polyoxyethylene alkyl ethers (e.g., Brij 35, Brij 58), as well as others, including Triton X-100, Triton X-114, NP-40, Span 85 and the Pluronic series of non-ionic surfactants (e.g., Pluronic 121). The surfactant is preferably present in a concentration of from about 0.0005% to about 0.5% (wt/vol).

[0835] Polymeric polyanion stabilizers may also be used to enchance the stability of the VLP formulations of the invention. Suitable polymeric polyanionic stabilizers for use in the invention comprise either a single long chain or multiple cross linked chains; either type possessing multiple negative charges along the chains when in solution. Examples of suitable polyanionic polymers include proteins, polyanions, peptides and polynucelic acids. Specific examples include carboxymethyl cellulose, heparin, polyamino acids (such as poly(Glu), poly(Asp), and Poly (Glu, Phe), oxidized glutathione, polynuceltodies, RNA, DNA and serum albumins. The concentration of the polmeric polyanion stabilizers is preferably from about 0.01% to about 0.5%, particularly about 0.05-0.1% (by weight).

G. Passive Immunization via Antibodies to the SARS Antigens of the Invention

[0836] The invention includes antibodies specific to the SARS antigens of the invention and methods of treatment or prevention of SARS virus related disease by administrating an effective amount of SARS antibodies to a mammalian subject. Antibodies specific the SARS antigens can be produced by one skilled in the art. Preferably, the antibodies are specific to the spike (S) protein of the SARS virus. Potent neutralization of the SARS coronavirus using a human monoclonal anti-spike antibody has been reported (Sui et al. (2004) PNAS USA 101:2536-2541). A IgG1 form of the monoclonal antibody showed a higher affinity (1.59 nM) than a scFv form (32.3 nM).

[0837] The antibodies of the invention are specific and selective to SARS antigens.

[0838] In one embodiment, the antibodies of the invention are generated by administering a SARS antigen to an animal. The method may also include isolating the antibodies from the animal.

[0839] The antibodies of the invention may be polyclonal or monoclonal antibody preparations, monospecific antisera, human antibodies, or may be hybrid or chimeric antibodies, such as humanized antibodies, altered antibodies (Fab′)₂ fragments, F(ab) fragments, Fv fragments, single-domain antibodies, dimeric or trimeric antibody fragments or constructs, minibodies, or functional fragments thereof which bind to the antigen in question.

[0840] Antibodies are produced using techniques well known to those of skill in the art and disclosed in, for example, U.S. Pat. Nos. 4,011,308; 4,722,890; 4,016,043; 3,876,504; 3,770,380; and 4,372,745. For example, polyclonal antibodies are generated by immunizing a suitable animal, such as a mouse, rat, rabbit, sheep, or goat, with an antigen of interest. In order to enhance immunogenicity, the antigen can be linked to a carrier prior to immunization. Such carriers are well known to those of ordinary skill in the art. Immunization is generally performed by mixing or emulsifying the antigen in saline, preferably in an adjuvant such as Freund's complete adjuvant, and injecting the mixture or emulsion parenterally (generally subcutaneously or intramuscularly). The animal is generally boosted 2-6 weeks later with one or more injections of the antigen in saline, preferably using Freund's incomplete adjuvant. Antibodies may also be generated by in vitro immunization, using methods known in the art. Polyclonal antiserum is then obtained from the immunized animal.

[0841] Monoclonal antibodies are generally prepared using the method of Kohler & Milstein (1975) Nature 256:495-497, or a modification thereof. Typically, a mouse or rat is immunized as described above. Rabbits may also be used. However, rather than bleeding the animal to extract serum, the spleen (and optionally several large lymph nodes) is removed and dissociated into single cells. If desired, the spleen cells may be screened (after removal of non-specifically adherent cells) by applying a cell suspension to a plate or well coated with the antigen. B-cells, expressing membrane-bound immunoglobulin specific for the antigen, will bind to the plate, and are not rinsed away with the rest of the suspension. Resulting B-cells, or all dissociated spleen cells, are then induced to fuse with myeloma cells to form hybridomas, and are cultured in a selective medium (e.g., hypoxanthine, aminopterin, thymidine medium, “HAT”). The resulting hybridomas are plated by limiting dilution, and are assayed for the production of antibodies which bind specifically to the immunizing antigen (and which do not bind to unrelated antigens). The selected monoclonal antibody-secreting hybridomas are then cultured either in vitro (e.g., in tissue culture bottles or hollow fiber reactors), or in vivo (e.g., as ascites in mice).

[0842] Humanized and chimeric antibodies are also useful in the invention. Hybrid (chimeric) antibody molecules are generally discussed in Winter et al. (1991) Nature 349: 293-299 and U.S. Pat. No. 4,816,567. Humanized antibody molecules are generally discussed in Riechmann et al. (1988) Nature 332:323-327; Verhoeyan et al. (1988) Science 239:1534-1536; and U.K. Patent Publication No. GB 2,276,169, published 21 Sep. 1994). One approach to engineering a humanized antibody involves cloning recombinant DNA containing the promoter, leader, and variable-region sequences from a mouse antibody gene and the constant-region exons from a human antibody gene to create a mouse-human chimera, a humanized antibody. See generally, Kuby, “Immunology, 3^{rd} Edition”, W.H. Freeman and Company, New York (1998) at page 136.

[0843] Antibody fragments which retain the ability to recognize a SARS antigen are also included within the scope of the invention. A number of antibody fragments are known in the art which comprise antigen-binding sites capable of exhibiting immunological binding properties of an intact antibody molecule. For example, functional antibody fragments can be produced by cleaving a constant region, not responsible for antigen binding, from the antibody molecule, using e.g., pepsin, to produce F(ab′)₂ fragments. These fragments will contain two antigen binding sites, but lack a portion of the constant region from each of the heavy chains. Similarly, if desired, Fab fragments, comprising a single antigen binding site, can be produced, e.g., by digestion of polyclonal or monclonal antibodies with papain. Functional fragments, includnig only the variable regions of the heavy and light chains, can also be produced, using standard techniques such as recombinant production or preferential proteolytic cleavage of immunoglobulin molecules. These fragments are known as Fᵥ. See, e.g., Inbar et al. (1972) Proc. Nat. Acad. Sci USA 69:2659-2662; Hochman et al. (1976) Biochem 15:2706-2710; and Ehrlich et al. (1980) Biochem 19:4091-4096.

[0844] A single-chain Fv (“sFv” or scFv”) polypeptide is a covalently linked V_{H}-V_{L} heterodimer which is expressed from a gene fusion including V_{H}- and V_{L}-encoding genes linked by a peptide-encoding linker. Huston et al. (1988) Proc. Nat. Acad. Sci. USA 85:5879-5883. A number of methods have been described to discern and develop chemical strucutres (linkers) for converting the naturally aggregated, but chemically separated, light and heavy polypeptide chains from an antibody V region into an sFv molecule which will fold into a three dimensional structure substantially similar to the structure of an antigen-binding site. See, e.g., U.S. Pat. Nos. 5,091,513; 5,132,405; and 4,946,778. The sFv molecules may be produced using methods described in thea rt. See, e.g., Huston et al. (1988) Proc. Nat. Acad. Sci USA 85:5879-5338; U.S. Pat. Nos. 5,091,513; 5,132,405 and 4,946,778. Design criteria include determining the appropriate length to span the distance between the C-terminus of one chain and the N-terminus of the other, wherein the linker is generally formed from small hydrophilic amino acid residues that do not coil or form secondary structures. Such methods have been described in the art. See, e.g., U.S. Pat. Nos. 5,091,513; 5,132,405 and 4,946,778. Suitable linkers generally comprise polypeptide chains of alternating sets of glycine and serine residues, and may include glutamic acid and lysine residues inserted to enhance solubility. Anti-spike scFv antibodies have been reported (Sui et al. (2004) PNAS USA 101:2536-2541).

[0845] “Mini-antibodies” or “minibodies” will also find use with the present invention. Minibodies are sFv polypeptide chains which include oligomerization domains at their C-termini, separated from the sFv by a hinge region. Pack et al., (1992) Biochem 31:1579-1584. The oligomerization domain comprises self-associating α-helices, e.g., leucine zippers, that can be further stabilized by additional disulfide bonds. The oligomerization domain is designed to be compatible with vectorial folding across a membrane, a process thought to facilitate in vivo folding of the polypeptide into a functional binding protein. Generally, minibodies are produced using recombinant methods well known in the art. See, e.g., Pack et al., (1992) Biochem 31:1579-1584; Cumber et al. (1992) J. Immunology 149B: 120-126.

[0846] Non-conventional means can also be used to generate and identify the antibodies of the invention. For example, a phage display library can be screened for antibodies which bind to the SARS antigens of the invention. See generally, Siegel, “Recombinant Monoclonal Antibody Technology”, Transfus. Clin. Biol. (2002) 9(1): 15-22; Sidhu, “Phage Display in Pharmaceutical Biotechnology”, Curr. Opin. Biotechnol. (2000) 11(6):610-616; Sharon, et al., “Recombinant Polyclonal Antibody Libraries”, Comb. Chem. High Throughput Screen (2000) 3(3): 185-196; and Schmitz et al., “Phage Display: A Molecular Tool for the Generation of Antibodies-Review”, Placenta, (2000) 21 SupplA: S106-12.

[0847] The antibodies of the invention may also be generated by administering the polynucleotide sequence encoding for the SARS antigen into an animal. The SARS antigen is then expressed in vivo, and antibodies specific to the SARS antigen are generated in vivo. Methods for polynucleotide delivery of the SARS antigens of the invention are discussed in section 4 below.

[0848] The antibodies of the invention are preferably specific to the SARS virus.

H. Combinations of One or More of any of the Above Approaches in a Vaccine

[0849] The compositions of the invention further comprise combinations of one or more of the compositions discussed above. For instance, the invention comprises a composition comprising an attenuated SARS virus and a subunit SARS viral antigen.

I. Combinations of SARS Antigens and Other Respiratory Virus Antigens

[0850] The invention further relates to vaccine formulations comprising one or more SARS virus antigens and one or more other respiratory virus antigens. Additional respiratory virus antigens suitable for use in the invention include antigens from influenza virus, human rhinovirus (HRV), parainfluenza virus (PIV), respiratory syncytial virus (RSV), adenovirus, metapneumovirus, and rhinovirus. The additional respiratory virus antigen could also be from a coronavirus other than the SARS coronavirus, such as the NL63 human coronavirus (van der Hoek et al. (2004) Nature Medicine 10:368-373). Preferably, the additional respiratory virus antigen is an influenza viral antigen.

[0851] The invention may also comprise one or more bacterial or viral antigens in combination with the SARS viral antigen. Antigens may be used alone or in any combination. (See, e.g., WO 02/00249 describing the use of combinations of bacterial antigens). The combinations may include multiple antigens from the same pathogen, multiple antigens from different pathogens or multiple antigens from the same and from different pathogens. Thus, bacterial, viral, and/or other antigens may be included in the same composition or may be administered to the same subject separately. It is generally preferred that combinations of antigens be used to raise an immune response be used in combinations.

[0852] Non-limiting examples of bacterial pathogens which may be used in the invention include diphtheria (See, e.g., Chapter 3 of Vaccines, 1998, eds. Plotkin & Mortimer (ISBN 0-7216-1946-0), staphylococcus (e.g., Staphylococcus aureus as described in Kuroda et al. (2001) Lancet 357:1225-1240), cholera, tuberculosis, C. tetani, also known as tetanus (See, e.g., Chapter 4 of Vaccines, 1998, eds. Plotkin & Mortimer (ISBN 0-7216-1946-0), Group A and Group B streptococcus (including Streptococcus pneumoniae, Streptococcus agalactiae and Streptococcus pyogenes as described, for example, in Watson et al. (2000) Pediatr. Infect. Dis. J. 19:331-332; Rubin et al. (2000) Pediatr Clin. North Am. 47:269-284; Jedrzejas et al. (2001) Microbiol Mol Biol Rev 65:187-207; Schuchat (1999) Lancet 353:51-56; GB patent applications 0026333.5; 0028727.6; 015640.7; Dale et al. (1999) Infect Dis Clin North Am 13:227-1243; Ferretti et al. (2001) PNAS USA 98:4658-4663), pertussis (See, e.g., Gusttafsson et al. (1996) N. Engl. J. Med. 334:349-355; Rappuoli et al. (1991) TIBTECH 9:232-238), meningitis, Moraxella catarrhalis (See, e.g., McMichael (2000) Vaccine 19 Suppl. 1:S101-107) and other pathogenic states, including, without limitation, Neisseria meningitides (A, B, C, Y), Neisseria gonorrhoeae (See, e.g., WO 99/24578; WO 99/36544; and WO 99/57280), Helicobacter pylori (e.g., CagA, VacA, NAP, HopX, HopY and/or urease as described, for example, WO 93/18150; WO 99/53310; WO 98/04702) and Haemophilus influenza. Hemophilus influenza type B (HIB) (See, e.g., Costantino et al. (1999) Vaccine 17:1251-1263), Porphyromonas gingivalis (Ross et al. (2001) Vaccine 19:4135-4132) and combinations thereof.

[0853] Non-limiting examples of viral pathogens which may be used in the invention include meningitis, rhinovirus, influenza (Kawaoka et al., Virology (1990) 179:759-767; Webster et al., “Antigenic variation among type A influenza viruses,” p. 127-168. In: P. Palese and D. W. Kingsbury (ed.), Genetics of influenza viruses. Springer-Verlag, New York), respiratory syncytial virus (RSV), parainfluenza virus (PIV), rotavirus (e.g., VP1, VP2, VP3, VP4, VP6, VP7, NSP1, NSP2, NSP3, NSP4 or NSP5 and other rotavirus antigens, for example as described in WO 00/26380) and the like. Antigens derived from other viruses will also find use in the present invention, such as without limitation, proteins from members of the families Picomaviridae (e.g., polioviruses, etc. as described, for example, in Sutter et al. (2000) Pediatr Clin North Am 47:287-308; Zimmerman & Spann (1999) Am Fam Physician 59:113-118; 125-126); Caliciviridae; Togaviridae (e.g., rubella virus, etc.); Flaviviridae, including the genera flavivirus (e.g., yellow fever virus, Japanese encephalitis virus, serotypes of Dengue virus, tick borne encephalitis virus, West Nile virus, St. Louis encephalitis virus); pestivirus (e.g., classical porcine fever virus, bovine viral diarrhea virus, border disease virus); and hepacivirus (e.g., hepatitis A, B and C as described, for example, in U.S. Pat. Nos. 4,702,909; 5,011,915; 5,698,390; 6,027,729; and 6,297,048); Parvovirus (e.g., parvovirus B19); Coronaviridae; Reoviridae; Bimaviridae; Rhabodoviridae (e.g., rabies virus, etc. as described for example in Dressen et al. (1997) Vaccine 15 Suppl:s2-6; MMWR Morb Mortal Wkly Rep. Jan. 16, 1998; 47(1):12, 19); Filoviridae; Paramyxoviridae (e.g., mumps virus, measles virus, respiratory syncytial virus, etc. as described in Chapters 9 to 11 of Vaccines, 1998, eds. Plotkin & Mortimer (ISBN 0-7216-1946-0); Orthomyxoviridae (e.g., influenza virus types A, B and C, etc. as described in Chapter 19 of Vaccines, 1998, eds. Plotkin & Mortimer (ISBN 0-7216-1946-0),); Bunyaviridae; Arenaviridae; Retroviradae (e.g., HTLV-1; HTLV-11; HIV-1 (also known as HTLV-III, LAV, ARV, HTI,R, etc.)), including but not limited to antigens from the isolates HIVI11b, HIVSF2, HIVLAV, HIVI-AL, I-IIVMN, SF162); HIV-I CM235, HIV-I US4; HIV-2; simian immunodeficiency virus (SIV) among others. Additionally, antigens may also be derived from human papilloma virus (HPV) and the tick-borne encephalitis viruses. See, e.g. Virology, 3^{rd} Edition (W. K. Joklik ed. 1988); Fundamental Virology, 2nd Edition (B. N. Fields and D. M. Knipe, eds, 1991), for a description of these and other viruses.

[0854] Proteins may also be derived from the herpesvirus family, including proteins derived from herpes simplex virus (HSV) types 1 and 2, such as HSV-1 and HSV-2 glycoproteins gB, gD and gH; antigens derived from varicella zoster virus (VZV), Epstein-Barr virus (EBV) and cytomegalovirus (CMV) including CMV gB and gH (See, U.S. Pat. No. 4,689,225 and PCT Publication WO 89/07143); and antigens derived from other human herpesviruses such as HHV6 and HHV7. (See, e.g. Chee et al., Cytomegaloviruses (J. K. McDougall, ed., Springer-Verlag 1990) pp. 125-169, for a review of the protein coding content of cytomegalovirus; McGeoch et al., J. Gen. Virol. (1988) 69:1531-1574, for a discussion of the various HSV-1 encoded proteins; U.S. Pat. No. 5,171,568 for a discussion of HSV-1 and HSV-2 gB and gD proteins and the genes encoding therefor; Baer et al., Nature (1984) 310:207-211, for the identification of protein coding sequences in an EBV genome; and Davison and Scott, J. Gen. Virol. (1986) 67:1759-1816, for a review of VZV). Herpes simplex virus (HSV) rgD2 is a recombinant protein produced in genetically engineered Chinese hamster ovary cells. This protein has the normal anchor region truncated, resulting in a glycosylated protein secreted into tissue culture medium. The gD2 can be purified in the CHO medium to greater than 90% purity. Human immunodeficiency virus (HIV) env-2-3 is a recombinant form of the HIV enveloped protein produced in genetically engineered Saccharomyces cerevisae. This protein represents the entire protein region of HIV gp120 but is non-glycosylated and denatured as purified from the yeast. HIV gp120 is a fully glycosylated, secreted form of gp120 produced in CHO cells in a fashion similar to the gD2 above. Additional HSV antigens suitable for use in immunogenic compositions are described in PCT Publications W0 85/04587 and W0 88/02634, the disclosures of which are incorporated herein by reference in their entirety. Mixtures of gB and gD antigens, which are truncated surface antigens lacking the anchor regions, are particularly preferred.

[0855] Antigens from the hepatitis family of viruses, including hepatitis A virus (HAV) (See, e.g., Bell et al. (2000) Pediatr Infect Dis. J. 19:1187-1188; Iwarson (1995) APMIS 103:321-326), hepatitis B virus (HBV) (See, e.g., Gerlich et al. (1990) Vaccine 8 Suppl:S63-68 & 79-80), hepatitis C virus (HCV) (See, e.g., PCT/US88/04125, published European application number 318216), the delta hepatitis virus (HDV), hepatitis E virus (HEV) and hepatitis G virus (HGV), can also be conveniently used in the techniques described herein. By way of example, the viral genomic sequence of HCV is known, as are methods for obtaining the sequence. See, e.g., International Publication Nos. WO 89/04669; WO 90/11089; and WO 90/14436. Also included in the invention are molecular variants of such polypeptides, for example as described in PCT/US99/31245; PCT/US99/31273 and PCT/US99/31272. The HCV genome encodes several viral proteins, including E1 (also known as E) and E2 (also known as E2/NSI) and an N-terminal nucleocapsid protein (termed “core”) (see, Houghton et al., Hepatology (1991) 14:381-388, for a discussion of HCV proteins, including E1 and E2). Similarly, the sequence for the δ-antigen from HDV is known (see, e.g., U.S. Pat. No. 5,378,814) and this antigen can also be conveniently used in the present composition and methods. Additionally, antigens derived from HBV, such as the core antigen, the surface antigen, SAg, as well as the presurface sequences, pre-S1 and pre-S2 (formerly called pre-S), as well as combinations of the above, such as SAg/pre-S1, SAg/pre-S2, SAg/pre-S1/pre-S2, and pre-S1/pre-S2, will find use herein. See, e.g., “HBV Vaccines—from the laboratory to license: a case study” in Mackett, M. and Williamson, J. D., Human Vaccines and Vaccination, pp. 159-176, for a discussion of HBV structure; and U.S. Pat. Nos. 4,722,840, 5,098,704, 5,324,513, incorporated herein by reference in their entireties; Beames et al., J. Virol. (1995) 69:6833-6838, Birnbaum et al., J. Virol. (1990) 64:3319-3330; and Zhou et al., J. Virol. (1991) 65:5457-5464. Each of these proteins, as well as antigenic fragments thereof, will find use in the present composition and methods.

[0856] Influenza virus is another example of a virus for which the present invention will be particularly useful. Specifically, the envelope glycoproteins HA and NA of influenza A are of particular interest for generating an immune response. Numerous HA subtypes of influenza A have been identified (Kawaoka et al., Virology (1990) 179:759-767; Webster et al., “Antigenic variation among type A influenza viruses,” p. 127-168. In: P. Palese and D. W. Kingsbury (ed.), Genetics of influenza viruses. Springer-Verlag, New York). Thus, proteins derived from any of these isolates can also be used in the compositions and methods described herein.

[0857] Non-limiting examples of parasitic antigens include those derived from organisms causing malaria and Lyme disease.

[0858] The methods of the invention comprise administering an immunogenic composition comprising a SARS viral antigen (including one or more of an inactivated SARS virus, an attenuated SARS virus, a split SARS virus preparation or a recombinant or purified subunit formulation of one or more SARS viral antigens) to an animal. The immunogenic compositions used in the invention can comprise an immunologically effective amount of the SARS viral antigen. An “immunologically effective amount” is an amount sufficient to allow the mammal to raise an immune response to the SARS antigen.

[0859] The immune response preferably involves the production of antibodies specific to the SARS antigen. The amount of antibodies produced will vary depending on several factors including the animal used, the presence of an adjuvant, etc.

[0860] The immunogenic compositions of the invention may further comprise one or more adjuvants.

[0861] The immunogenic compositions of the invention may be administered mucosally. Suitable routes of mucosal administration include oral, intranasal, intragastric, pulmonary, intestinal, rectal, ocular and vaginal routes. The immunogenic composition may be adapted for mucosal administration. For instance, where the composition is for oral administration, it may be in the form of tablets or capsules, optionally enteric-coated, liquid, transgenic plants, etc. Where the composition is for intranasal administration, it may be in the form of a nasal spray, nasal drops, gel or powder.

[0862] The immunogenic compositions of the invention may be administered parenterally. Suitable routes of parenteral administration include intramuscular (IM), subcutaneous, intravenous, intraperitoneal, intradermal, transcutaneous, and transdermal (see e.g., International patent application WO 98/20734) routes, as well as delivery to the interstitial space of a tissue. The immunogenic composition may be adapted for parenteral administration, for instance in the form of an injectable that may be sterile and pyrogen free.

[0863] Vaccines of the invention may be administered in conjunction with other immunoregulatory agents. In particular, compositions will usually include an adjuvant. Preferred further adjuvants include, but are not limited to, one or more of the following set forth below:

A. Mineral Containing Compositions

[0864] Mineral containing compositions suitable for use as adjuvants in the invention include mineral salts, such as aluminium salts and calcium salts. The invention includes mineral salts such as hydroxides (e.g. oxyhydroxides), phosphates (e.g. hydroxyphoshpates, orthophosphates), sulphates, etc. (e.g. see chapters 8 & 9 of Vaccine design: the subunit and adjuvant approach (1995) Powell & Newman. ISBN 0-306-44867-X.), or mixtures of different mineral compounds, with the compounds taking any suitable form (e.g. gel, crystalline, amorphous, etc.), and with adsorption being preferred. The mineral containing compositions may also be formulated as a particle of metal salt. See WO00/23105.

B. Oil-Emulsions

[0865] Oil-emulsion compositions suitable for use as adjuvants in the invention include squalene-water emulsions, such as MF59 (5% Squalene, 0.5% Tween 80, and 0.5% Span 85, formulated into submicron particles using a microfluidizer). See WO90/14837. See also, Frey et al., “Comparison of the safety, tolerability, and immunogenicity of a MF59-adjuvanted influenza vaccine and a non-adjuvanted influenza vaccine in non-elderly adults”, Vaccine (2003) 21:4234-4237.

[0866] Particularly preferred adjuvants for use in the compositions are submicron oil-inwater emulsions. Preferred submicron oil-in-water emulsions for use herein are squalene/water emulsions optionally containing varying amounts of MTP-PE, such as a submicron oil-in-water emulsion containing 4-5% w/v squalene, 0.25-1.0% w/v Tween 80™ (polyoxyelthylenesorbitan monooleate), and/or 0.25-1.0% Span 85™ (sorbitan trioleate), and, optionally, N-acetylmuramyl-L-alanyl-D-isogluatminyl-L-alanine-2-(1′-2′-dipalmitoyl-sn-glycero-3-huydroxyphosphophoryloxy)-ethylamine (MTP-PE), for example, the submicron oil-in-water emulsion known as “MF59” (International Publication No. WO 90/14837; U.S. Pat. Nos. 6,299,884 and 6,451,325, incorporated herein by reference in their entireties; and Ott et al., “MF59—Design and Evaluation of a Safe and Potent Adjuvant for Human Vaccines” in Vaccine Design: The Subunit and Adjuvant Approach (Powell, M. F. and Newman, M. J. eds.) Plenum Press, New York, 1995, pp. 277-296). MF59 contains 4-5% w/v Squalene (e.g., 4.3%), 0.25-0.5% w/v Tween 80™, and 0.5% w/v Span 85™ and optionally contains various amounts of MTP-PE, formulated into submicron particles using a microfluidizer such as Model 110Y microfluidizer (Microfluidics, Newton, Mass.). For example, MTP-PE may be present in an amount of about 0-500 μg/dose, more preferably 0-250 μg/dose and most preferably, 0-100 μg/dose. As used herein, the term “MF59-0” refers to the above submicron oil-in-water emulsion lacking MTP-PE, while the term MF59-MTP denotes a formulation that contains MTP-PE. For instance, “MF59-100” contains 100 μg MTP-PE per dose, and so on. MF69, another submicron oil-in-water emulsion for use herein, contains 4.3% w/v squalene, 0.25% w/v Tween 80™, and 0.75% w/v Span 85™ and optionally MTP-PE. Yet another submicron oil-in-water emulsion is MF75, also known as SAF, containing 10% squalene, 0.4% Tween 80™, 5% pluronic-blocked polymer L121, and thr-MDP, also microfluidized into a submicron emulsion. MF75-MTP denotes an MF75 formulation that includes MTP, such as from 100-400 μg MTP-PE per dose.

[0867] Submicron oil-in-water emulsions, methods of making the same and immunostimulating agents, such as muramyl peptides, for use in the compositions, are described in detail in International Publication No. WO 90114837 and U.S. Pat. Nos. 6,299,884 and 6,451,325, incorporated herein by reference in their entireties.

[0868] Complete Freund's adjuvant (CFA) and incomplete Freund's adjuvant (IFA) may also be used as adjuvants in the invention.

C. Saponin Formulations

[0869] Saponin formulations, may also be used as adjuvants in the invention. Saponins are a heterologous group of sterol glycosides and triterpenoid glycosides that are found in the bark, leaves, stems, roots and even flowers of a wide range of plant species. Saponin from the bark of the Quillaia saponaria Molina tree have been widely studied as adjuvants. Saponin can also be commercially obtained from Smilax ornata (sarsaprilla), Gypsophilla paniculata (brides veil), and Saponaria officianalis (soap root). Saponin adjuvant formulations include purified formulations, such as QS21, as well as lipid formulations, such as ISCOMs.

[0870] Saponin compositions have been purified using High Performance Thin Layer Chromatography (HP-LC) and Reversed Phase High Performance Liquid Chromatography (RP-HPLC). Specific purified fractions using these techniques have been identified, including QS7, QS17, QS18, QS21, QH-A, QH-B and QH-C. Preferably, the saponin is QS21. A method of production of QS21 is disclosed in U.S. Pat. No. 5,057,540. Saponin formulations may also comprise a sterol, such as cholesterol (see WO 96/33739).

[0871] Combinations of saponins and cholesterols can be used to form unique particles called Immunostimulating Complexs (ISCOMs). ISCOMs typically also include a phospholipid such as phosphatidylethanolamine or phosphatidylcholine. Any known saponin can be used in ISCOMs. Preferably, the ISCOM includes one or more of Quil A, QHA and QHC. ISCOMs are further described in EP 0 109 942, WO 96/11711 and WO 96/33739. Optionally, the ISCOMS may be devoid of additional detergent. See WO00/07621.

[0872] A review of the development of saponin based adjuvants can be found at Barr, et al., “ISCOMs and other saponin based adjuvants”, Advanced Drug Delivery Reviews (1998) 32:247-271. See also Sjolander, et al., “Uptake and adjuvant activity of orally delivered saponin and ISCOM vaccines”, Advanced Drug Delivery Reviews (1998) 32:321-338.

D. Bacterial or Microbial Derivatives

[0873] Adjuvants suitable for use in the invention include bacterial or microbial derivatives such as:

[0874] (1) Non-Toxic Derivatives of Enterobacterial Lipopolysaccharide (LPS)

[0875] Such derivatives include Monophosphoryl lipid A (MPL) and 3-O-deacylated MPL (3dMPL). 3dMPL is a mixture of 3 De-O-acylated monophosphoryl lipid A with 4, 5 or 6 acylated chains. A preferred “small particle” form of 3 De-O-acylated monophosphoryl lipid A is disclosed in EP 0 689 454. Such “small particles” of 3dMPL are small enough to be sterile filtered through a 0.22 micron membrane (see EP 0 689 454). Other non-toxic LPS derivatives include monophosphoryl lipid A mimics, such as aminoalkyl glucosaminide phosphate derivatives e.g. RC-529. See Johnson et al. (1999) Bioorg Med Chem Lett 9:2273-2278.

[0876] (2) Lipid A Derivatives

[0877] Lipid A derivatives include derivatives of lipid A from Escherichia coli such as OM-174. OM-174 is described for example in Meraldi et al., “OM-174, a New Adjuvant with a Potential for Human Use, Induces a Protective Response with Administered with the Synthetic C-Terminal Fragment 242-310 from the circumsporozoite protein of Plasmodium berghei”, Vaccine (2003) 21:2485-2491; and Pajak, et al., “The Adjuvant OM-174 induces both the migration and maturation of murine dendritic cells in vivo”, Vaccine (2003) 21:836-842.

[0878] (3) Immunostimulatory Oligonucleotides

[0879] Immunostimulatory oligonucleotides suitable for use as adjuvants in the invention include nucleotide sequences containing a CpG motif (a sequence containing an unmethylated cytosine followed by guanosine and linked by a phosphate bond). Bacterial double stranded RNA or oligonucleotides containing palindromic or poly(dG) sequences have also been shown to be immunostimulatory.

[0880] The CpG's can include nucleotide modifications/analogs such as phosphorothioate modifications and can be double-stranded or single-stranded. Optionally, the guanosine may be replaced with an analog such as 2′-deoxy-7-deazaguanosine. See Kandimalla, et al., “Divergent synthetic nucleotide motif recognition pattern: design and development of potent immunomodulatory oligodeoxyribonucleotide agents with distinct cytokine induction profiles”, Nucleic Acids Research (2003) 31(9): 2393-2400; WO 02/26757 and WO 99/62923 for examples of possible analog substitutions. The adjuvant effect of CpG oligonucleotides is further discussed in Krieg, “CpG motifs: the active ingredient in bacterial extracts?”, Nature Medicine (2003) 9(7): 831-835; McCluskie, et al., “Parenteral and mucosal prime-boost immunization strategies in mice with hepatitis B surface antigen and CpG DNA”, FEMS Immunology and Medical Microbiology (2002) 32:179-185; WO 98/40100; U.S. Pat. No. 6,207,646; U.S. Pat. No. 6,239,116 and U.S. Pat. No. 6,429,199.

[0881] The CpG sequence may be directed to TLR9, such as the motif GTCGTT or TTCGTT. See Kandimalla, et al., “Toll-like receptor 9: modulation of recognition and cytokine induction by novel synthetic CpG DNAs”, Biochemical Society Transactions (2003) 31 (part 3): 654-658. The CpG sequence may be specific for inducing a Th1 immune response, such as a CpG-A ODN, or it may be more specific for inducing a B cell response, such a CpG-B ODN. CpG-A and CpG-B ODNs are discussed in Blackwell, et al., “CpG-A-Induced Monocyte IFN-gamma-Inducible Protein-10 Production is Regulated by Plasmacytoid Dendritic Cell Derived IFN-alpha”, J. Immunol. (2003) 170(8):4061-4068; Krieg, “From A to Z on CpG”, TRENDS in Immunology (2002) 23(2): 64-65 and WO 01/95935. Preferably, the CpG is a CpG-A ODN.

[0882] Preferably, the CpG oligonucleotide is constructed so that the 5′ end is accessible for receptor recognition. Optionally, two CpG oligonucleotide sequences may be attached at their 3′ ends to form “immunomers”. See, for example, Kandimalla, et al., “Secondary structures in CpG oligonucleotides affect immunostimulatory activity”, BBRC (2003) 306:948-953; Kandimalla, et al., “Toll-like receptor 9: modulation of recognition and cytokine induction by novel synthetic GpG DNAs”, Biochemical Society Transactions (2003) 31(part 3):664-658; Bhagat et al., “CpG penta- and hexadeoxyribonucleotides as potent immunomodulatory agents” BBRC (2003) 300:853-861 and WO 03/035836.

[0883] (4) ADP-Ribosylating Toxins and Detoxified Derivatives Thereof.

[0884] Bacterial ADP-ribosylating toxins and detoxified derivatives thereof may be used as adjuvants in the invention. Preferably, the protein is derived from E. coli (i.e., E. coli heat labile enterotoxin “LT), cholera (“CT”), or pertussis (“PT”). The use of detoxified ADP-ribosylating toxins as mucosal adjuvants is described in WO 95/17211 and as parenteral adjuvants in WO 98/42375. Preferably, the adjuvant is a detoxified LT mutant such as LT-K63, LT-R72, and LTR192G. The use of ADP-ribosylating toxins and detoxified derivaties thereof, particularly LT-K63 and LT-R72, as adjuvants can be found in the following references, each of which is specifically incorporated by reference herein in their entirety: Beignon, et al., “The LTR72 Mutant of Heat-Labile Enterotoxin of Escherichia coli Enahnces the Ability of Peptide Antigens to Elicit CD4+ T Cells and Secrete Gamma Interferon after Coapplication onto Bare Skin”, Infection and Immunity (2002) 70(6):3012-3019; Pizza, et al., “Mucosal vaccines: non-toxic derivatives of LT and CT as mucosal adjuvants”, Vaccine (2001) 19:2534-2541; Pizza, et al., “LTK63 and LTR72, two mucosal adjuvants ready for clinical trials” Int. J. Med. Microbiol (2000) 290(4-5):455-461; Scharton-Kersten et al., “Transcutaneous Immunization with Bacterial ADP-Ribosylating Exotoxins, Subunits and Unrelated Adjuvants”, Infection and Immunity (2000) 68(9):5306-5313; Ryan et al., “Mutants of Escherichia coli Heat-Labile Toxin Act as Effective Mucosal Adjuvants for Nasal Delivery of an Acellular Pertussis Vaccine: Differential Effects of the Nontoxic AB Complex and Enzyme Activity on Th1 and Th2 Cells” Infection and Immunity (1999) 67(12):6270-6280; Partidos et al., “Heat-labile enterotoxin of Escherichia coli and its site-directed mutant LTK63 enhance the proliferative and cytotoxic T-cell responses to intranasally co-immunized synthetic peptides”, Immunol. Lett. (1999) 67(3):209-216; Peppoloni et al., “Mutants of the Escherichia coli heat-labile enterotoxin as safe and strong adjuvants for intranasal delivery of vaccines”, Vaccines (2003) 2(2):285-293; and Pine et al., (2002) “Intranasal immunization with influenza vaccine and a detoxified mutant of heat labile enterotoxin from Escherichia coli (LTK63)” J. Control Release (2002) 85(1-3):263-270. Numerical reference for amino acid substitutions is preferably based on the alignments of the A and B subunits of ADP-ribosylating toxins set forth in Domenighini et al., Mol. Microbiol (1995) 15(6): 1165-1167, specifically incorporated herein by reference in its entirety.

E. Human Immunomodulators

[0885] Human immunomodulators suitable for use as adjuvants in the invention include cytokines, such as interleukins (e.g. IL-1, IL-2, IL-4, IL-5, IL-6, IL-7, IL-12, etc.), interferons (e.g. interferon-γ), macrophage colony stimulating factor, and tumor necrosis factor.

F. Bioadhesives and Mucoadhesives

[0886] Bioadhesives and mucoadhesives may also be used as adjuvants in the invention. Suitable bioadhesives include esterified hyaluronic acid microspheres (Singh et al. (2001) J. Cont. Rele. 70:267-276) or mucoadhesives such as cross-linked derivatives of poly(acrylic acid), polyvinyl alcohol, polyvinyl pyrollidone, polysaccharides and carboxymethylcellulose. Chitosan and derivatives thereof may also be used as adjuvants in the invention. E.g., WO99/27960.

G. Microparticles

[0887] Microparticles may also be used as adjuvants in the invention. Microparticles (i.e. a particle of ˜100 nm to ˜150 μm in diameter, more preferably ˜200 nm to ˜30 μm in diameter, and most preferably ˜500 nm to ˜10 μm in diameter) formed from materials that are biodegradable and non-toxic (e.g. a poly(α-hydroxy acid), a polyhydroxybutyric acid, a polyorthoester, a polyanhydride, a polycaprolactone, etc.), with poly(lactide-co-glycolide) are preferred, optionally treated to have a negatively-charged surface (e.g. with SDS) or a positively-charged surface (e.g. with a cationic detergent, such as CTAB).

H. Liposomes

[0888] Examples of liposome formulations suitable for use as adjuvants are described in U.S. Pat. No. 6,090,406, U.S. Pat. No. 5,916,588, and EP 0 626 169.

I. Polyoxyethylene Ether and Polyoxyethylene Ester Formulations

[0889] Adjuvants suitable for use in the invention include polyoxyethylene ethers and polyoxyethylene esters. WO99/52549. Such formulations further include polyoxyethylene sorbitan ester surfactants in combination with an octoxynol (WO01/21207) as well as polyoxyethylene alkyl ethers or ester surfactants in combination with at least one additional non-ionic surfactant such as an octoxynol (WO01/21152).

[0890] Preferred polyoxyethylene ethers are selected from the following group: polyoxyethylene-9-lauryl ether (laureth 9), polyoxyethylene-9-steoryl ether, polyoxytheylene-8-steoryl ether, polyoxyethylene-4-lauryl ether, polyoxyethylene-35-lauryl ether, and polyoxyethylene-23-lauryl ether.

J. Polyphosphazene (PCPP)

[0891] PCPP formulations are described, for example, in Andrianov et al., “Preparation of hydrogel microspheres by coacervation of aqueous polyphophazene solutions”, Biomaterials (1998) 19(1-3):109-115 and Payne et al., “Protein Release from Polyphosphazene Matrices”, Adv. Drug. Delivery Review (1998) 31(3):185-196.

K. Muramyl peptides

[0892] Examples of muramyl peptides suitable for use as adjuvants in the invention include N-acetyl-muramyl-L-threonyl-D-isoglutamine (thr-MDP), N-acetyl-normuramyl-L-alanyl-D-isoglutamine (nor-MDP), and N-acetylmuramyl-L-alanyl-D-isoglutaminyl-L-alanine-2-(1′-2′-dipalmitoyl-sn-glycero-3-hydroxyphosphoryloxy)-ethylaamine MTP-PE).

L. Imidazoquinolone Compounds.

[0893] Examples of imidazoquinolone compounds suitable for use adjuvants in the invention include Imiquamod and its homologues, described further in Stanley, “Imiquimod and the imidazoquinolones: mechanism of action and therapeutic potential” Clin Exp Dermatol (2002) 27(7):571-577 and Jones, “Resiquimod 3M”, Curr Opin Investig Drugs (2003) 4(2):214-218

M. Virosomes and Virus Like Particles (VLPs)

[0894] Virosomes and Virus Like Particles (VLPs) can also be used as adjuvants in the invention. These structures generally contain one or more proteins from a virus optionally combined or formulated with a phospholipid. They are generally non-pathogenic, non-replicating and generally do not contain any of the native viral genome. The viral proteins may be recombinantly produced or isolated from whole viruses. These viral proteins suitable for use in virosomes or VLPs include proteins derived from influenza virus (such as HA or NA), Hepatitis B virus (such as core or capsid proteins), Hepatitis E virus, measles virus, Sindbis virus, Rotavirus, Foot-and-Mouth Disease virus, Retrovirus, Norwalk virus, human Papilloma virus, HIV, RNA-phages, Qβ-phage (such as coat proteins), GA-phage, fr-phage, AP205 phage, and Ty (such as retrotransposon Ty protein p1). VLPs are discussed further in WO 03/024480, WO 03/024481, and Niukura et al., “Chimeric Recombinant Hepatitis E Virus-Like Particles as an Oral Vaccine Vehicle Presenting Foreign Epitopes”, Virology (2002) 293:273-280; Lenz et al., “Papillomarivurs-Like Particles Induce Acute Activation of Dendritic Cells”, Journal of Immunology (2001) 5246-5355; Pinto, et al., “Cellular Immune Responses to Human Papillomavirus (HPV)-16 L1 Healthy Volunteers Immunized with Recombinant HPV-16 L1 Virus-Like Particles”, Journal of Infectious Diseases (2003) 188:327-338; and Gerber et al., “Human Papillomavrisu Virus-Like Particles Are Efficient Oral immunogens when Coadministered with Escherichia coli Heat-Labile Entertoxin Mutant R192G or CpG”, Journal of Virology (2001) 75(10):4752-4760. Virosomes are discussed further in, for example, Gluck et al., “New Technology Platforms in the Development of Vaccines for the Future”, Vaccine (2002) 20:B10-B16.

[0895] The invention may also comprise combinations of aspects of one or more of the adjuvants identified above. For example, the following adjuvant compositions may be used in the invention:

[0896] (1) a saponin and an oil-in-water emulsion (WO99/11241);

[0897] (2) a saponin (e.g., QS21)+a non-toxic LPS derivative (e.g., 3dMPL) (see WO 94/00153);

[0898] (3) a saponin (e.g., QS21)+a non-toxic LPS derivative (e.g., 3dMPL)+a cholesterol;

[0899] (4) a saponin (e.g. QS21)+3dMPL+IL-12 (optionally +a sterol) (WO98/57659);

[0900] (5) combinations of 3dMPL with, for example, QS21 and/or oil-in-water emulsions (See European patent applications 0835318, 0735898 and 0761231);

[0901] (6) SAF, containing 10% Squalane, 0.4% Tween 80, 5% pluronic-block polymer L121, and thr-MDP, either microfluidized into a submicron emulsion or vortexed to generate a larger particle size emulsion.

[0902] (7) Ribi™ adjuvant system (RAS), (Ribi Immunochem) containing 2% Squalene, 0.2% Tween 80, and one or more bacterial cell wall components from the group consisting of monophosphorylipid A (MPL), trehalose dimycolate (TDM), and cell wall skeleton (CWS), preferably MPL+CWS (Detox™); and

[0903] (8) one or more mineral salts (such as an aluminum salt)+a non-toxic derivative of LPS (such as 3dPML).

[0904] Aluminium salts and MF59 are preferred adjuvants for parenteral immunisation. Mutant bacterial toxins are preferred mucosal adjuvants.

[0905] As mentioned above, adjuvants suitable for use in the invention may also include one or more of the following:

[0906] E. coli heat-labile enterotoxin (“LT”), or detoxified mutants thereof, such as the K63 or R72 mutants;

[0907] cholera toxin (“CT”), or detoxified mutants thereof;

[0908] microparticles (i.e., a particle of ˜100 nm to ˜150 μm in diameter, more preferably ˜200 nm to ˜30 μm in diameter, and most preferably 500 nm to ˜10 μm in diameter) formed from materials that are biodegradable and non-toxic (e.g. a poly(α-hydroxy acid), a polyhydroxybutyric acid, a polyorthoester, a polyanhydride, a polycaprolactone etc.);

[0909] a polyoxyethylene ether or a polyoxyethylene ester (see International patent application WO 99/52549);

[0910] a polyoxyethylene sorbitan ester surfactant in combination with an octoxynol (see International patent application WO 01/21207) or a polyoxyethylene alkyl ether or ester surfactant in combination with at least one additional non-ionic surfactant such as an octoxynol (see International patent application WO 01/21152);

[0911] chitosan (e.g. International patent application WO 99/27960)

[0912] an immunostimulatory oligonucleotide (e.g. a CpG oligonucleotide) and a saponin (see International patent application WO 00/62800)

[0913] immunostimulatory double stranded RNA.

[0914] aluminum compounds (e.g. aluminum hydroxide, aluminum phosphate, aluminum hydroxyphosphate, oxyhydroxide, orthophosphate, sulfate etc. (e.g. see chapters 8 & 9 of Vaccine design: the subunit and adjuvant aproach, eds. Powell & Newman, Plenum Press 1995 (ISBN 0-306-44867-X) (hereinafter “Vaccine design”), or mixtures of different aluminum compounds, with the compounds taking any suitable form (e.g. gel, crystalline, amorphous etc.), and with adsorption being preferred;

[0915] MF59 (5% Squalene, 0.5% Tween 80, and 0.5% Span 85, formulated into submicron particles using a microfluidizer) (see Chapter 10 of Vaccine design; see also International patent application WO 90/14837);

[0916] liposomes (see Chapters 13 and 14 of Vaccine design);

[0917] ISCOMs (see Chapter 23 of Vaccine design);

[0918] SAF, containing 10% Squalane, 0.4% Tween 80, 5% pluronic-block polymer L121, and thr-MDP, either microfluidized into a submicron emulsion or vortexed to generate a larger particle size emulsion (see Chapter 12 of Vaccine design);

[0919] Ribi™ adjuvant system (RAS), (Ribi Immunochem) containing 2% Squalene, 0.2% Tween 80, and one or more bacterial cell wall components from the group consisting of monophosphorylipid A (MPL), trehalose dimycolate (TDM), and cell wall skeleton (CWS), preferably MPL+CWS (Detox™);

[0920] saponin adjuvants, such as QuilA or QS21 (see Chapter 22 of Vaccine design), also known as Stimulon™;

[0921] ISCOMs, which may be devoid of additional detergent (WO 00/07621);

[0922] complete Freund's adjuvant (CFA) and incomplete Freund's adjuvant (IFA);

[0923] cytokines, such as interleukins (e.g. IL-1, IL-2, IL-4, IL-5, IL-6, IL-7, IL-12, etc.), interferons (e.g. interferon-γ), macrophage colony stimulating factor, tumor necrosis factor, etc. (see Chapters 27 & 28 of Vaccine design);

[0924] monophosphoryl lipid A (MPL) or 3-O-deacylated MPL (3dMPL) (e.g. chapter 21 of Vaccine design);

[0925] combinations of 3dMPL with, for example, QS21 and/or oil-in-water emulsions (European patent applications 0835318, 0735898 and 0761231);

[0926] oligonucleotides comprising CpG motifs (see Krieg (2000) Vaccine, 19:618-622; Krieg (2001) Curr. Opin. Mol. Ther., 2001, 3:15-24; WO 96/02555, WO 98/16247, WO 98/18810, WO 98/40100, WO 98/55495, WO 98/37919 and WO 98/52581, etc.) i.e. containing at least one CG dinucleotide,

[0927] a polyoxyethylene ether or a polyoxyethylene ester (International patent application WO99/52549);

[0928] a polyoxyethylene sorbitan ester surfactant in combination with an octoxynol (International patent application WO 01/21207) or a polyoxyethylene alkyl ether or ester surfactant in combination with at least one additional non-ionic surfactant such as an octoxynol (WO 01/21152);

[0929] an immunostimulatory oligonucleotide (e.g. a CpG oligonucleotide) and a saponin (WO00/62800);

[0930] an immunostimulant and a particle of metal salt (International patent application WO00/23105);

[0931] a saponin and an oil-in-water emulsion (WO 99/11241);

[0932] a saponin (e.g. QS21)+3dMPL+IL-12 (optionally+a sterol) (WO 98/57659).

[0933] Other adjuvants suitable for mucosal or parenteral administration are also available (e.g. see chapter 7 of Vaccine design: the subunit and adjuvant aproach, eds. Powell & Newman, Plenum Press 1995 (ISBN 0-306-44867-X).

[0934] Mutants of LT are preferred mucosal adjuvants, in particular the “K63” and “R72” mutants (e.g. see International patent application WO 98/18928), as these result in an enhanced immune response.

[0935] Microparticles are also preferred mucosal adjuvants. These are preferably derived from a poly(a-hydroxy acid), in particular, from a poly(lactide) (“PLA”), a copolymer of D,L-lactide and glycolide or glycolic acid, such as a poly(D,L-lactide-co-glycolide) (“PLG” or “PLGA”), or a copolymer of D,L-lactide and caprolactone. The microparticles may be derived from any of various polymeric starting materials which have a variety of molecular weights and, in the case of the copolymers such as PLG, a variety of lactide:glycolide ratios, the selection of which will be largely a matter of choice, depending in part on the coadministered antigen.

[0936] The SARS virus (inactivated or attenuated), viral antigens, antibodies or adjuvants of the invention may be entrapped within the microparticles, or may be adsorbed to them. Entrapment within PLG microparticles is preferred. PLG microparticles are discussed in further detail in Morris et al., (1994), Vaccine, 12:5-11, in chapter 13 of Mucosal Vaccines, eds. Kiyono et al., Academic Press 1996 (ISBN 012410587), and in chapters 16 & 18 of Vaccine design: the subunit and adjuvant aproach, eds. Powell & Newman, Plenum Press 1995 (ISBN 0-306-44867-X).

[0937] LT mutants may advantageously be used in combination with microparticle-entrapped antigen, resulting in significantly enhanced immune responses.

[0938] Aluminium compounds and MF59 are preferred adjuvants for parenteral use.

[0939] The composition may include an antibiotic.

[0940] The immunogenic compositions of the invention may be administered in a single dose, or as part of an administration regime. The regime may include priming and boosting doses, which may be administered mucosally, parenterally, or various combinations thereof.

[0941] The methods of the invention further comprise treating or preventing a SARS virus-related disease by administering to an animal a composition comprising an effective amount of the antibodies of the invention. An “effective amount” of the antibodies of the invention is an amount sufficient to provide passive immunization protection or treatment to the animal. Preferably, the antibodies of the invention are specific to the SARS viral antigen.

[0942] Methods of treatment may combine both immunogenic compositions and antibody compositions. Accordingly the invention comprises a method for treating or preventing a SARS virus-related disease comprising administering an immunogenic composition comprising an immunologically effective amount of a SARS viral antigen and administering an effective amount of antibodies specific to SARS viral antigen. The immunogenic composition and the antibodies may be administered together or separately. The invention further comprises a composition comprising an immunogenic composition comprising an immunologically effective amount of a SARS viral antigen and further comprising an effective amount of antibodies specific to a SARS viral antigen.

[0943] The SARS viral antigens and antibodies of the invention may also be administered in polynucleotide form. The SARS viral antigens and/or antibody proteins are then expressed in vivo.

[0944] The SARS viral antigens and the antibodies of the invention can also be delivered using one or more gene vectors, administered via nucleic acid immunization or the like using standard gene delivery protocols. Methods for gene delivery are known in the art. See, e.g., U.S. Pat. Nos. 5,399,346, 5,580,859, 5,589,466. The constructs can be delivered (e.g., injected) either subcutaneously, epidermally, intradermally, intramuscularly, intravenous, mucosally (such as nasally, rectally and vaginally), intraperitoneally, orally or combinations thereof. Intramuscular injection of 25 μg plasmid DNA encoding spike antigens, in 200 μl PBS pH 7.4, at weeks 0, 3 and 6, has been described for mice by Yang et al. (2004) Nature 428:561-564.

[0945] An exemplary replication-deficient gene delivery vehicle that may be used in the practice of the present invention is any of the alphavirus vectors, described in, for example, U.S. Pat. Nos. 6,342,372; 6,329,201 and International Publication WO 01/92552.

[0946] A number of viral based systems have been developed for gene transfer into mammalian cells. For example, retroviruses provide a convenient platform for gene delivery systems. Selected sequences can be inserted into a vector and packaged in retroviral particles using techniques known in the art. The recombinant virus can then be isolated and delivered to cells of the subject either in vivo or ex vivo. A number of retroviral systems have been described (U.S. Pat. No. 5,219,740; Miller & Rosman, BioTechniques (1989) 7:980-990; Miller, A. D., Human Gene Therapy (1990) 1:5-14; Scarpa et al., Virology (1991) 180:849-852; Burns et al., Proc. Natl. Acad. Sci. USA (1993) 90:8033-8037; and Boris-Lawrie & Temin, Cur. Opin. Genet. Develop. (1993) 3:102-109.

[0947] A number of adenovirus vectors have also been described. Unlike retroviruses which integrate into the host genome, adenoviruses persist extrachromosomally thus minimizing the risks associated with insertional mutagenesis (Haj-Ahmad and Graham, J. Virol. (1986) 57:267-274; Bett et al., J. Virol. (1993) 67:5911-5921; Mittereder et al., Human Gene Therapy (1994) 5:717-729; Seth et al., J. Virol. (1994) 68:933-940; Barr et al., Gene Therapy (1994) 1:51-58; Berkner, K. L. BioTechniques (1988) 6:616-629; and Rich et al., Human Gene Therapy (1993) 4:461-476). Adenoviral delivery of codon-optimsed versions of the genes encoding SARS coronavirus structural antigens spike S1, membrane protein and nucleocapsid protein has been investigated in rhesus macaques and found to invoke a strong neutralizing antibody response (Gao et al. (2003) Lancet 362(9399):1895-1896).

[0948] Additionally, various adeno-associated virus (AAV) vector systems have been developed for gene delivery. AAV vectors can be readily constructed using techniques well known in the art. See, e.g., U.S. Pat. Nos. 5,173,414 and 5,139,941; International Publication Nos. WO 92/01070 (published 23 Jan. 1992) and WO 93/03769 (published 4 Mar. 1993); Lebkowski et al., Molec. Cell. Biol. (1988) 8:3988-3996; Vincent et al., Vaccines 90 (1990) (Cold Spring Harbor Laboratory Press); Carter, B. J. Current Opinion in Biotechnology (1992) 3:533-539; Muzyczka, N. Current Topics in Microbiol. and Immunol. (1992) 158:97-129; Kotin, R. M. Human Gene Therapy (1994) 5:793-801; Shelling and Smith, Gene Therapy (1994) 1:165-169; and Zhou et al., J. Exp. Med. (1994) 179:1867-1875.

[0949] Another vector system useful for delivering polynucleotides, mucosally and otherwise, is the enterically administered recombinant poxvirus vaccines described by Small, Jr., P. A., et al. (U.S. Pat. No. 5,676,950, issued Oct. 14, 1997, herein incorporated by reference) as well as the vaccinia virus and avian poxviruses. By way of example, vaccinia virus recombinants expressing the genes can be constructed as follows. The DNA encoding the SARS antigen or antibody or antibody coding sequence is first inserted into an appropriate vector so that it is adjacent to a vaccinia promoter and flanking vaccinia DNA sequences, such as the sequence encoding thymidine kinase (TK). This vector is then used to transfect cells that are simultaneously infected with vaccinia. Homologous recombination serves to insert the vaccinia promoter plus the gene encoding the coding sequences of interest into the viral genome. The resulting TK⁻ recombinant can be selected by culturing the cells in the presence of 5-bromodeoxyuridine and picking viral plaques resistant thereto.

[0950] Alternatively, avipoxviruses, such as the fowlpox and canarypox viruses, can also be used to deliver genes encoding the SARS viral antigens or antibodies of the invention. Recombinant avipox viruses, expressing immunogens from mammalian pathogens, are known to confer protective immunity when administered to non-avian species. The use of an avipox vector is particularly desirable in human and other mammalian species since members of the avipox genus can only productively replicate in susceptible avian species and therefore are not infective in mammalian cells. Methods for producing recombinant avipoxviruses are known in the art and employ genetic recombination, as described above with respect to the production of vaccinia viruses. See, e.g., WO 91/12882; WO 89/03429; and WO 92/03545. Picornavirus-derived vectors can also be used. (See, e.g., U.S. Pat. Nos. 5,614,413 and 6,063,384).

[0951] Molecular conjugate vectors, such as the adenovirus chimeric vectors described in Michael et al., J. Biol. Chem. (1993) 268:6866-6869 and Wagner et al., Proc. Natl. Acad. Sci. USA (1992) 89:6099-6103, can also be used for gene delivery.

[0952] A vaccinia based infection/transfection system can be conveniently used to provide for inducible, transient expression of the coding sequences of interest (for example, a SARS viral antigen or antibody expression cassette) in a host cell. In this system, cells are first infected in vitro with a vaccinia virus recombinant that encodes the bacteriophage T7 RNA polymerase. This polymerase displays exquisite specificity in that it only transcribes templates bearing T7 promoters. Following infection, cells are transfected with the polynucleotide of interest, driven by a T7 promoter. The polymerase expressed in the cytoplasm from the vaccinia virus recombinant transcribes the transfected DNA into RNA that is then translated into protein by the host translational machinery. The method provides for high level, transient, cytoplasmic production of large quantities of RNA and its translation products. See, e.g., Elroy-Stein and Moss, Proc. Natl. Acad. Sci. USA (1990) 87:6743-6747; Fuerst et al., Proc. Natl. Acad. Sci. USA (1986) 83:8122-8126.

[0953] As an alternative approach to infection with vaccinia or avipox virus recombinants, or to the delivery of genes using other viral vectors, an amplification system can be used that will lead to high level expression following introduction into host cells. Specifically, a T7 RNA polymerase promoter preceding the coding region for T7 RNA polymerase can be engineered. Translation of RNA derived from this template will generate T7 RNA polymerase that in turn will transcribe more template. Concomitantly, there will be a cDNA whose expression is under the control of the T7 promoter. Thus, some of the T7 RNA polymerase generated from translation of the amplification template RNA will lead to transcription of the desired gene. Because some T7 RNA polymerase is required to initiate the amplification, T7 RNA polymerase can be introduced into cells along with the template(s) to prime the transcription reaction. The polymerase can be introduced as a protein or on a plasmid encoding the RNA polymerase. For a further discussion of T7 systems and their use for transforming cells, see, e.g., International Publication No. WO 94/26911; Studier and Moffatt, J. Mol. Biol. (1986) 189:113-130; Deng and Wolff, Gene (1994) 143:245-249; Gao et al., Biochem. Biophys. Res. Commun. (1994) 200:1201-1206; Gao and Huang, Nuc. Acids Res. (1993) 21:2867-2872; Chen et al., Nuc. Acids Res. (1994) 22:2114-2120; and U.S. Pat. No. 5,135,855.

[0954] The immunogenic compositions of the invention may further comprise diluents, such as water, saline, glycerol, ethanol, etc. Additionally, auxiliary substances, such as wetting or emulsifying agents, pH buffering substances, and the like may be included in the immunogenic composition.

[0955] The immunogenic compositions used in the invention can be administered to an animal. Animals suitable for use in the methods of the invention include humans and other primates, including non-human primates such as chimpanzees, and other apes and monkey species; farm animals such as cattle, sheep, pigs, goats and horses, domestic animals such as dogs and cats; laboratory animals including rodents such as mice, rats and guinea pigs; birds, including domestic, wild and game birds such as chickens, turkeys and other gallinaceous birds, ducks, geese and the like. Animals suitable for use in the invention can be of any age, including both adult and newborn. Transgenic animals can also be used in the invention.

[0956] The immunogenic compositions of the invention can be-used to treat or prevent SARS virus-related diseases.

[0957] The compositions of the invention are preferably pharmaceutically acceptable and pharmacologically acceptable. In particularly, the compositions are preferably not biologically or otherwise undesirable, i.e., the material may be administered to an individual in a formulation or composition without causing any undesirable biological effects or interacting in a deleterious manner with any of the components of the composition in which it is contained.

[0958] Pharmaceutically acceptable salts can also be used in compositions of the invention, for example, mineral salts such as hydrochlorides, hydrobromides, phosphates, or sulfates, as well as salts of organic acids such as acetates, proprionates, malonates, or benzoates. Especially useful protein substrates are serum albumins, keyhole limpet hemocyanin, immunoglobulin molecules, thyroglobulin, ovalbumin, tetanus toxoid, and other proteins well known to those of skill in the art. Compositions of the invention can also contain liquids or excipients, such as water, saline, glycerol, dextrose, ethanol, or the like, singly or in combination, as well as substances such as wetting agents, emulsifying agents, or pH buffering agents. Liposomes can also be used as a carrier for a composition of the invention.

[0959] SARS specific reagents and analytical assays may be used in the manufacture and testing of the vaccines of the invention. Such analytical assays include, for example: 1) virus titration and plaque assays for quantitation of infectious virus particles, 2) a neutralization assay with constant virus and varying serum dilutions, 3) a two step RT-PCR system (Light Cycler-Roche) for detection of negative strand viral RNA, with the target sequence located within the N gene, providing highest possible sensitivity, and 4) ELISA and western blot assays for detection and qualification of viral proteins.

[0960] In addition, rabbit polyclonal antiserum has been generated to obtain antibody reagents (and demonstrate induction of neutralizing antibodies) against the SARS-CoV. A sample protocol for generating such reagents is set forth below. The virus is first cultivated in suitable cell culture, such as Vero cells, and pelleted through a 20% sucrose (w/v) cushion. The pellet is then subjected to a glycerol potassium-tartrate gradient for further purification. The virus-containing fraction is then diluted and pelleted by ultracentrifugation. The pellet is then dissolved in PBS and the virus is inactivated with C₃H₄O₂ (beta-propiolactone, BPL). Two rabbits are immunized subcutaneously (SC) on day 0, 14, and 2 8 with 1×10⁹ inactivated viral particles mixed with IFA as adjuvant. Rabbits are bled on days 0 (p,re-inoculation), 13, 28, and 35 (1 week after 3rd immunization). Sera obtained from this protocol were tested for their reactivity against SARS-CoV proteins in western blots and found to react with the major structural proteins spike (S), membrane (M), and nucleocapsid (N).

J. Emerging Coronavirus Vaccines

[0961] The SARS epidemic has lead to increased awareness of viral infections caused by coronaviruses. The vaccines of the invention may be adapted to prevent or treat emerging strains of coronavirus, including emerging strains of SARS virus.

[0962] The invention provides a vaccine comprising an inactivated (or killed) human coronavirus, an attenuated human coronavirus, a split human coronavirus preparation, or a recombinant or purified subunit formulation of one or more antigens from a human coronavirus, wherein the human coronavirus is not the SARS coronavirus. Optionally, the human coronavirus is not the 229E coronavirus. Optionally, the human coronavirus is not the OC43 coronavirus. Optionally, the human coronavirus is not the NL63 coronavirus. Thus the invention provides a vaccine as defined above, wherein the human coronavirus is not the SARS coronavirus, is not the 229E coronavirus, is not the OC43 coronavirus and is not the NL63 coronavirus. Such vaccines are useful for preventing and/or treating emerging human coronavirus infections.

[0963] The invention also provides a vaccine comprising: (a) an inactivated (or killed) human coronavirus, an attenuated human coronavirus, a split human coronavirus preparation, or a recombinant or purified subunit formulation of one or more antigens from a human coronavirus, wherein the human coronavirus is not the SARS coronavirus, as defined above; and (b) an inactivated (or killed) human coronavirus, an attenuated human coronavirus, a split human coronavirus preparation, or a recombinant or purified subunit formulation of one or more antigens from a human coronavirus, wherein the human coronavirus is the SARS coronavirus. Such vaccines are useful for preventing and/or treating both SARS and other human coronaviruses.

[0964] As well as providing vaccines comprising antigens from more than one type of coronavirus, the invention also provides vaccines comprising antigens from more than one strain of the same coronavirus e.g. different strains of the SARS coronavirus, or different strains of a coronavirus other than the SARS coronavirus. In one embodiment, the vaccine comprises antigens from at least two strains of coronavirus, or at least three strains of coronavirus. In one embodiment, the vaccine comprises antigens from at least two types of coronavirus. In one embodiment, the vaccine comprises at least one antigen from each of the known types of coronaviruses (type I, type II and type III). Such vaccines follow the model of current influenza vaccines.

[0965] The selection of coronaviruses and/or coronavirus strains for use in vaccines of the invention can be based on various criteria. For instance, selection may be based on viruses and/or strains that have been detected in the geographical region (e.g. northern or southern hemisphere, a particular country, etc.) where the vaccine targeted. Selection may be based on the results of animal surveillance e.g. of viruses detected in cat populations. Selection may be based on the results of clinical surveillance e.g. of viruses detected in patients hospitalized with respiratory infection. Selection may be performed every year e.g. prior to winter. Vaccines may also be administered yearly, again following the model of current influenza vaccines.

[0966] Preferred vaccines are sufficiently immunogenic to provide a neutralizing immune response, and more preferably a protective and/or therapeutic immune response. Particularly preferred vaccines meet the efficacy requirements that may be specified by the WHO from time to time.

[0967] A preferred subunit antigen for inclusion in vaccines of the invention is a purified spike protein, more preferably in oligomeric (e.g. trimeric) form. The spike protein may or my not be cleaved e.g. into its S1 and S2 products.

[0968] The techniques disclosed above for selecting viruses and/or strains for production of vaccines can also be used to select appropriate viruses and/or strains from which HR1 and HR2 sequences can be obtained for providing therapeutic peptides, as disclosed above.

III. Diagnostic Compositions and Methods of the Invention

[0969] The invention provides methods for detecting the SARS coronavirus. Detection in patient samples can be used to detect and diagnose infections by the virus. Detection in donated blood can be used to prevent inadvertent transmission of the virus during blood transplant procedures Detection methods fall into three main categories: detection of SARS virus nucleic acids; detection of SARS virus proteins; and detection of anti-SARS virus immune responses. The invention provides all such methods.

[0970] As used herein when referring to nucleotide sequences, particularly oligonucleotide probes and primers, “similar” sequences includes those sequences that are at least 90% identical to known SARSV genomic sequence and includes sequences that are at least 95% identical, at least 99% identical and 100% identical to the SARSV genomic sequence over the length of the probe or primer.

[0971] As used herein, the term “target nucleic acid region” or “target nucleic acid” denotes a nucleic acid molecule with a “target sequence” to be amplified. The target nucleic acid may be either single-stranded or double-stranded and may include other sequences besides the target sequence, which may not be amplified. The term “target sequence” refers to the particular nucleotide sequence of the target nucleic acid which is to be amplified. The target sequence may include a probe-hybridizing region contained within the target molecule with which a probe will form a stable hybrid under desired conditions. The “target sequence” may also include the complexing sequences to which the oligonucleotide primers complex and be extended using the target sequence as a template. Where the target nucleic acid is originally single-stranded, the term “target sequence” also refers to the sequence complementary to the “target sequence” as present in the target nucleic acid. If the “target nucleic acid” is originally double-stranded, the term “target sequence” refers to both the plus (+) and minus (−) strands.

[0972] The term “primer” or “oligonucleotide primer” as used herein, refers to an oligonucleotide which acts to initiate synthesis of a complementary DNA strand when placed under conditions in which synthesis of a primer extension product is induced i.e. in the presence of nucleotides and a polymerization-inducing agent such as a DNA or RNA polymerase and at suitable temperature, pH, metal concentration, and salt concentration. The primer is preferably single-stranded for maximum efficiency in amplification, but may alternatively be double-stranded. If double-stranded, the primer is first treated to separate its strands before being used to prepare extension products. This denaturation step is typically effected by heat, but may alternatively be carried out using alkali, followed by neutralization. Thus, a “primer” is complementary to a template, and complexes by hydrogen bonding or hybridization with the template to give a primer/template complex for initiation of synthesis by a polymerase, which is extended by the addition of covalently bonded bases linked at its 3′ end complementary to the template in the process of DNA synthesis.

[0973] As used herein, the term “probe” or “oligonucleotide probe” refers to a structure comprised of a polynucleotide, as defined above, that contains a nucleic acid sequence complementary to a nucleic acid sequence present in the target nucleic acid analyte. The polynucleotide regions of probes may be composed of DNA, and/or RNA, and/or synthetic nucleotide analogs. When an “oligonucleotide probe” is to be used in a 5′ nuclease assay, such as the TaqMan™ technique, the probe will contain at least one fluorescer and at least one quencher which is digested by the 5′ endonuclease activity of a polymerase used in the reaction in order to detect any amplified target oligonucleotide sequences. In this context, the oligonucleotide probe will have a sufficient number of phosphodiester linkages adjacent to its 5′ end so that the 5′ to 3′ nuclease activity employed can efficiently degrade the bound probe to separate the fluorescers and quenchers. When an oligonucleotide probe is used in the TMA technique, it will be suitably labeled, as described below.

[0974] It will be appreciated that the hybridizing sequences need not have perfect complementarity to provide stable hybrids. In many situations, stable hybrids will form where fewer than about 10% of the bases are mismatches, ignoring loops of four or more nucleotides. Accordingly, as used herein the term “complementary” refers to an oligonucleotide that forms a stable duplex with its “complement” under assay conditions, generally where there is about 90% or greater homology.

[0975] The terms “hybridize” and “hybridization” refer to the formation of complexes between nucleotide sequences which are sufficiently complementary to form complexes via Watson-Crick base pairing. Where a primer “hybridizes” with target (template), such complexes (or hybrids) are sufficiently stable to serve the priming function required by e.g. the DNA polymerase to initiate DNA synthesis.

[0976] Stringent hybridization conditions will typically include salt concentrations of less than about 1 M, more usually less than about 500 mM and preferably less than about 200 mM. Hybridization temperatures can be as low as 5° C., but are typically greater than 22° C., more typically greater than about 30° C., and preferably in excess of about 37° C. Longer fragments may require higher hybridization temperatures for specific hybridization. Other factors may affect the stringency of hybridization, including base composition and length of the complementary strands, presence of organic solvents and extent of base mismatching, and the combination of parameters used is more important than the absolute measure of any one alone. Other hybridization conditions which may be controlled include buffer type and concentration, solution pH, presence and concentration of blocking reagents to decrease background binding such as repeat sequences or blocking protein solutions, detergent type(s) and concentrations, molecules such as polymers which increase the relative concentration of the polynucleotides, metal ion(s) and their concentration(s), chelator(s) and their concentrations, and other conditions known in the art. Less stringent, and/or more physiological, hybridization conditions are used where a labeled polynucleotide amplification product cycles on and off a substrate linked to a complementary probe polynucleotide during a real-time assay which is monitored during PCR amplification such as a molecular beacon assay. Such less stringent hybridization conditions can also comprise solution conditions effective for other aspects of the method, for example reverse transcription or PCR.

[0977] As used herein, a “biological sample” refers to a sample of tissue, cells or fluid isolated from a subject, that commonly includes antibodies produced by the subject. Typical samples include but are not limited to, blood, plasma, serum, fecal matter, urine, bone marrow, bile, spinal fluid, lymph fluid, samples of the skin, secretions of the skin, respiratory, intestinal, and genitourinary tracts, tears, saliva, sputum, mucous, milk, blood cells, organs, tissues, biopsies (e.g. lung, liver, kidney) and also samples of in vitro cell culture constituents including but not limited to conditioned media resulting from the growth of cells and tissues in culture medium e.g. recombinant cells, and cell components. Other samples that may be used for diagnosis include stool samples and nasopharyngeal aspirates.

[0978] The term “antibody” encompasses polyclonal and monoclonal antibody preparations, as well as preparations including hybrid antibodies, altered antibodies, chimeric antibodies and, humanized antibodies, as well as: hybrid (chimeric) antibody molecules (see, for example, Winter et al. (1991) Nature 349:293-299; and U.S. Pat. No. 4,816,567); F(ab′)₂ and F(ab) fragments; Fv molecules (noncovalent heterodimers, see, for example, Inbar et al. (1972) Proc Natl Acad Sci USA 69:2659-2662; and Ehrlich et al. (1980) Biochem 19:4091-4096); single-chain Fv molecules (sFv) (see, e.g., Huston et al. (1988) Proc Natl Acad Sci USA 85:5879-5883); oligobodies; dimeric and trimeric antibody fragment constructs; minibodies (see, e.g., Packet al. (1992) Biochem 31:1579-1584; Cumber et al. (1992) J Immunology 149B:120-126); humanized antibody molecules (see, e.g., Riechmann et al. (1988) Nature 332:323-327; Verhoeyan et al. (1988) Science 239:1534-1536; and UK Patent Publication No. GB 2,276,169, published 21 Sep. 1994); and, any functional fragments obtained from such molecules, wherein such fragments retain specific-binding properties of the parent antibody molecule.

[0979] As used herein, the term “monoclonal antibody” refers to an antibody composition having a homogeneous antibody population. The term is not limited regarding the species or source of the antibody, nor is it intended to be limited by the manner in which it is made. The term encompasses whole immunoglobulins.

[0980] Methods of making polyclonal and monoclonal antibodies are known in the art. Polyclonal antibodies are generated by immunizing a suitable animal, such as a mouse, rat, rabbit, sheep or goat, with an antigen of interest. In order to enhance immunogenicity, the antigen can be linked to a carrier prior to immunization. Suitable carriers are typically large, slowly metabolized macromolecules such as proteins, polysaccharides, polylactic acids, polyglycolic acids, polymeric amino acids, amino acid copolymers, lipid aggregates (such as oil droplets or liposomes), and inactive virus particles. Such carriers are well known to those of ordinary skill in the art. Furthermore, the antigen may be conjugated to a bacterial toxoid, such as toxoid from diphtheria, tetanus, cholera, etc., in order to enhance the immunogenicity thereof.

[0981] Rabbits, sheep and goats are preferred for the preparation of polyclonal sera when large volumes of sera are desired. These animals are good design choices also because of the availability of labeled anti-rabbit, anti-sheep and anti-goat antibodies. Immunization is generally performed by mixing or emulsifying the antigen in saline, preferably in an adjuvant such as Freund's complete adjuvant (“FCA”), and injecting the mixture or emulsion parenterally (generally subcutaneously or intramuscularly). The animal is generally boosted 2-6 weeks later with one or more injections of the antigen in saline, preferably using Freund's incomplete adjuvant (“FIA”). Antibodies may also be generated by in vitro immunization, using methods known in the art. Polyclonal antisera is then obtained from the immunized animal.

[0982] Monoclonal antibodies are generally prepared using the method of Kohler & Milstein (1975) Nature 256:495-497, or a modification thereof, as described above.

Nucleic Acid Detection Methods

[0983] There are many well known methods of amplifying targeted sequences, such as the polymerase chain reaction (PCR), reverse transcription PCR (RT-PCR), the ligase chain reaction (LCR), the strand displacement amplification (SDA), and the nucleic acid sequence-based amplification (NASBA), transcription-mediated amplification (TMA) to name a few. These methods are described generally in the following references: (PCR) U.S. Pat. Nos. 4,683,195, 4,683,202, and 4,800,159; (RT-PCR) U.S. Pat. Nos. 5,310,652, 5,322,770; (LCR) EP Application No., 320,308 published Jun. 14, 1989; (SDA) U.S. Pat. Nos. 5,270,184, and 5,455,166 and “Empirical Aspects of Strand Displacement Amplification” by G. T. Walker in PCR Methods and Applications, 3(1):1-6 (1993), Cold Spring Harbor Laboratory Press; (TMA) U.S. Pat. No. 5,399,491, and (NASBA) “Nucleic Acid Sequence-Based Amplification (NASBA™)” by L. Malek et al., Ch. 36 in Methods in Molecular Biology, Vol. 28: Protocols for Nucleic Acid Analysis by Nonradioactive Probes, 1994 Ed. P. G. Isaac, Humana Press, Inc., Totowa, N.J. PCR methods may include variations that permit quantitation of the target sequence, for example, by real time PCR analysis (e.g., as described in U.S. Pat. Nos. 5,210,015, 5,487,972, 5,994,056, 6,171,785 inter alia). (Each of the above references are hereby incorporated by reference).

[0984] One embodiment of the method of the invention for detecting the presence of SARS virus in a sample comprises providing a sample suspected of containing a SARS virus nucleic acid target, amplifying a template sequence contained within said SARS virus nucleic acid target by any known technique of nucleic acid amplification, including any of those mentioned herein, using the oligonucleotide primers described herein, particularly those primers comprising the kits described herein, and detecting the amplified template sequence, wherein the presence of the amplified template sequence indicates the presence of SARS virus in said sample.

[0985] Amplification techniques generally involve the use of two primers. Where a target sequence is single-stranded, the techniques generally involve a preliminary step in which a complementary strand is made in order to give a double-stranded target. The two primers hybridize to different strands of the double-stranded target and are then extended. The extended products can serve as targets for further rounds of hybridization/extension. The net effect is to amplify a template sequence within the target, the 5′ and 3′ termini of the template being defined by the locations of the two primers in the target. As an alternative, if one or both of the primers contains a promoter sequence then the target can be amplified (by transcription) using a RNA polymerase (as in TMA).

[0986] The present invention provides methods and kits for amplifying and/or detecting a template or target sequence in the SARSV viral nucleic acid. The invention provides a kit comprising primers for amplifying a template sequence contained within a SARSV nucleic acid target, the kit comprising a first primer and a second primer, wherein the first primer comprises a sequence substantially complementary to a portion of said template sequence and the second primer comprises a sequence substantially complementary to a portion of the complement of said template sequence, wherein the sequences within said primers which have substantial complementarity define the termini of the template sequence to be amplified.

[0987] Kits of the invention may further comprise a probe which is substantially complementary to the template sequence and/or to its complement and which can hybridize thereto. This probe can be used in a hybridization technique to detect amplified template, or to isolate (i.e. “capture) the amplified template or the original target nucleic acid.

[0988] Kits of the invention may further comprise primers and/or probes for generating and detecting an internal standard, in order to aid quantitative measurements (e.g Fille et al. 1997 Biotechniques 23:34-36).

[0989] Kits of the invention may further comprise a DNA polymerase, which will generally be a thermostable DNA polymerase where a non-isothermal amplification process is to be used. The kits may also comprise supplies of dNTPs, a magnesium salt (e.g. MgCl₂), buffer solutions, etc.

[0990] Kits of the invention may comprise more than one pair of primers (e.g. for nested amplification), and one primer may be common to more than one primer pair. The kit may also comprise more than one probe.

Oligomer Probes and Primers

[0991] In connection with the nucleic acid detection methods of the present invention described above, oligomers having sequence similarity, or complementarity, to the SARSV genome are useful. The SARSV genome sequences mentioned herein may be used to produce probes and primers which can be used in assays for the detection of nucleic acids in test samples. The probes may be designed from conserved nucleotide regions of the polynucleotides of interest or from non-conserved nucleotide regions of the polynucleotide of interest. The design of such probes for optimization in assays is within the skill of those of ordinary skill in the art. Generally, nucleic acid probes are developed from non-conserved or unique regions when maximum specificity is desired, and nucleic acid probes are developed from conserved regions when assaying for nucleotide regions that are closely related to, for example, different members of a multi-gene family or in related species like mouse and man.

[0992] Using as a basis the SARSV genome which can be found as described herein, and/or preferably conserved regions of the SARSV genome, and/or the particularly described primer and probe sequences as disclosed herein, oligomers of approximately 8 nucleotides or more can be prepared which hybridize with the positive strand(s) of SARSV RNA or its complement, as well as to SARSV cDNAs. These oligomers can serve as probes for the detection (including isolation and/or labeling) of polynucleotides which contain SARSV nucleotide sequences, and/or as primers for the transcription and/or replication of targeted SARSV sequences. The oligomers contain a targeting polynucleotide sequence, which is comprised of nucleotides which are complementary to a target SARSV nucleotide sequence; the sequence is of sufficient length and complementarity with the SARSV sequence to form a duplex which has sufficient stability for the purpose intended. For example, if the purpose is the isolation, via immobilization, of an analyte containing a target SARSV sequence, the oligomers would contain a polynucleotide region which is of sufficient length and complementarity to the targeted SARSV sequence to afford sufficient duplex stability to immobilize the analyte on a solid surface, via its binding to the oligomers, under the isolation conditions. For example, also, if the oligomers are to serve as primers for the transcription and/or replication of target SARSV sequences in an analyte polynucleotide, the oligomers would contain a polynucleotide region of sufficient length and complementarity to the targeted SARSV sequence to allow the polymerizing agent to continue replication from the primers which are in stable duplex form with the target sequence, under the polymerizing conditions. For example, also, if the oligomers are to be used as label probes, or are to bind to multimers, the targeting polynucleotide region would be of sufficient length and complementarity to form stable hybrid duplex structures with the label probes and/or multimers to allow detection of the duplex. The oligomers may contain a minimum of about 4 contiguous nucleotides which are complementary to targeted SARSV sequence; usually the oligomers will contain a minimum of about 8 contiguous nucleotides which are complementary to the targeted SARSV sequence, and preferably will contain a minimum of about 14, 15, 16, 17, 18, 19, 20,21, 22, 23, 24, 25, 26, 27, 28, 29, or 30 contiguous nucleotides and up to about 50, 75, 100, 200 contiguous nucleotides or more, which are complementary to the targeted SARSV sequence.

[0993] Typically, for use in the amplification based methods (for example, PCR, RT-PCR, TMA) oligomers will be used as primer sets such that one member of the primer set has sequence similarity or complementarity to a more conserved (among coronaviruses) portion of the SARSV genome and the other member of the primer set has sequence similarity or complementarity to a less conserved portion. The primer sets can be used to amplify the target region in ways that are well known in the art. Typically, the 5′ untranslated region (5′UTR) and the 3′ untranslated region (3′UTR) are among the most conserved regions. FIG. 8 shows an alignment of the 5′UTR of several coronaviruses. FIG. 10 shows an alignment of the 3′UTR of several coronaviruses. FIGS. 9 and 11 show the sequences of preferred primers for amplification of the 5′UTR and 3′UTR, respectively. Other primers and probes can readily be designed based on the sequence alignments provided herein.

[0994] The oligomer, however, need not consist only of the sequence which is complementary to the targeted SARSV sequence. It may contain in addition, nucleotide sequences (e.g. promoters) or other moieties which are suitable for the purposes for which the oligomers are used. For example, if the oligomers are used as primers for the amplification of SARSV sequences via, for example, PCR, they may contain sequences which, when in duplex, form restriction enzyme sites which facilitate the cloning of the amplified sequences. For example, also, if the oligomers are to be used as “capture probes” in hybridization assays, they would contain in addition a binding partner which is coupled to the oligomer containing the nucleotide sequence which is complementary to the targeted SARSV sequence. Other types of moieities or sequences which are useful of which the oligomers may be comprised or coupled to, are those which are known in the art to be suitable for a variety of purposes, including the labeling of nucleotide probes.

[0995] Table 4 (SEQ ID NOS: 1021-6020) shows forward and reverse primers that are useful for nucleic acid amplification of SARSV for diagnostic and screening methods.

[0996] Preferred primers and probes for SARS nucleic acid detection for diagnostic and screening are SEQ ID NOS: 7332-7336 (forward primers), SEQ ID NOS: 7337-7341 (reverse primers) and SEQ ID NOS: 7342-7352 (probes). These primers and probes are useful for detection of sequences in the 3′ UTR.

[0997] Any of the above forward primers may be used in combination with any of the above reverse primers for amplification of SARSV nucleic acid. The amplified product may be detected (or captured) with any of the above probes. Particularly preferred combinations of forward and reverse primers and the probes for detecting the amplified product include: Forward SEQ ID NO: 7332 with reverse SEQ ID NO: 7337, 7338, 7339 or 7341 and probe SEQ ID NO: 7342; forward SEQ ID NO: 7333 or 7334 with reverse SEQ ID NO: 7340 and any of probes SEQ ID NO: 7343-7351; Forward SEQ ID NO: 7335 and reverse SEQ ID NO: 7340 or 7341 and any of probes SEQ ID NO: 7342-7352. Other combinations of forward and reverse primers and appropriate probes can readily be determined by those skilled in the art from the above information.

[0998] Additional preferred primers and probes for SARS nucleic acid detection for diagnostic and screening are SEQ ID NOS: 7353-7362 (forward primers), SEQ ID NOS: 7363-7373 (reverse primers) and SEQ ID NOS: 7374-7385 (probes). The primers and probes are useful for detection of sequences in the 5′ UTR.

[0999] The above primers may be used in combination for amplification of SARSV nucleic acid as follows: any of forward primers SEQ ID NO: 7353-7356 with any of reverse primers SEQ ID NO: 7363-7366, 7368 and the amplified product detected (or captured) with probes SEQ ID NO: 7374; any of forward primers SEQ ID NO: 7357-7362 with any of reverse primers SEQ ID NO: 7367, 7369-7373 and the amplified products detected (or captured) with any of probes SEQ ID NO: 7375-7385. Particularly preferred combinations of forward and reverse primers and probes are: Forward primers SEQ ID NO: 7353-7356 with any of reverse primers SEQ ID NO: 7363-7366 and probes SEQ ID NO: 7374; forward primers SEQ ID NO: 7357-7358 with reverse primers SEQ ID NO: 7367, 7369 and probes SEQ ID NO: 7375 or 7376; Forward primers SEQ ID NO: 7357-7359 with reverse primers SEQ ID NO: 7367, 7369 or 7370 and probe SEQ ID NO: 7375 or 7376. More preferred are combinations of SEQ ID NO: 7353 or 7354 with SEQ ID NO: 7363 or 7364 and probe SEQ ID NO: 7374. Other combinations of forward and reverse primers and appropriate probes can readily be determined by those skilled in the art from the above information. A particularly conserved octanucleotide sequence (SEQ ID NO: 7386) occurs in the 3′UTR of SARS (approximately 70-80 bases from the 3′ end) and of several other Coronaviruses that may be particularly useful in identifying SARSV. Primers including in this region are preferably combined with reverse primers from regions of sequence that are more specific for SARS.

[1000] In addition to the above, the intergenic sequence (IS) that is characteristic of Coronavirus has been identified in SARSV (see above). The IS minimally comprises the sequence ACGAAC (SEQ ID NO: 7293) which occurs upstream of each open reading frame (ORF) in the viral genome. The 5′UTR which includes the IS is spliced onto the 5′ end of each viral mRNA at or adjacent to the site of the IS. Thus, primers comprising the IS or its complement are useful for amplifying viral nucleic acids, including cDNA made from the viral RNAs. The invention thus comprises a set of primers in which one primer comprises ACGAAC (SEQ ID NO: 7293) or its complement (SEQ ID NO: 7387) and one primer comprises any appropriate sequence from the SARS genome, or a complementary sequence. Useful probes for detecting and/or capturing the viral RNAs or cDNA made from the viral RNAs may also comprise the IS sequence, or its complement, described above.

[1001] One set of primers for amplification of SARS sequences, particularly by RT-PCR, uses SEQ ID NOs 6562, 6563, 6564 and 6565. Of these, 6562 & 6564 are sense primers and 6563 & 6565 are antisense primers. Primers SEQ ID NOS: 6562 & 6565 may be used in a first amplification, with a second nested amplification being performed using primers SEQ ID NOS: 6563 & 6564. In some embodiments of the invention, these four primers are excluded.

[1002] One kit for amplification and detection of SARS sequences, particularly by RT-PCR, uses SEQ ID NOs 6567 & 6568 as primers, and SEQ ID NO 6566 as a probe (typically labeled e.g. with TAMRA and/or FAM) for the amplified sequence. In some embodiments of the invention, these primers and probe are excluded.

[1003] One kit for amplification and detection of SARS sequences, particularly by RT-PCR, uses SEQ if NOs 7395 & 6568 as primers, and SEQ ID NO 6566 as a probe (typically labeled e.g. with TAMRA and/or FAM) for the amplified sequence. In some embodiments of the invention, these primers and probe are excluded.

[1004] One kit for amplification of SARS sequences, particularly the nucleocapsid gene, uses SEQ ID NOs 6560 & 6561 as primers. In some embodiments of the invention, these primers are excluded.

[1005] One kit for amplification of SARS sequences uses SEQ ID NOs 6496, 6497, 6562, 6563, 6564 & 6565 as primers. In some embodiments of the invention, these primers are excluded.

[1006] One kit for amplification of SARS sequences uses SEQ ID NOs 6562, 6563, 6564 & 6565 as primers. In some embodiments of the invention, these primers are excluded.

[1007] One kit for amplification of SARS sequences uses SEQ ID NOs 6500, 6501, 6502 & 6503 as primers. In some embodiments of the invention, these primers are excluded.

[1008] One kit for amplification of SARS sequences uses SEQ ID NOs 6496, 6497, 6500, 6501, 6502, 6503, 6562, 6563, 6564 & 6565 as primers. In some embodiments of the invention, these primers are excluded.

[1009] One kit for amplification and detection of SARS sequences, particularly by realtime (e.g. TaqMan™) PCR, uses SEQ ID NOs 6567 & 6568 as primers, and SEQ ID NO 6566 as a probe (typically labeled e.g. with TAMRA and/or FAM) for the amplified sequence. In some embodiments of the invention, these primers and probe are excluded.

[1010] One kit for amplification and detection of SARS sequences, particularly by realtime (e.g. TaqMan™) PCR, uses SEQ ID NOs 7395 & 6568 as primers, and SEQ ID NO 6566 as a probe (typically labeled e.g. with TAMRA and/or FAM) for the amplified sequence. In some embodiments of the invention, these primers and probe are excluded.

[1011] One kit for amplification and detection of SARS sequences uses SEQ ID NOs 6562, 6565 and 6568 as primers, and SEQ ID NOs 7396 and 7397 as probes (typically labeled e.g. with TAMRA and/or FAM) for the amplified sequence. In some embodiments of the invention, these primers and probe are excluded.

[1012] One kit for amplification and detection of SARS sequences uses an oligonucleotide comprising SEQ ID NO: 9780 as a forward primer, an oligonucleotide comprising SEQ ID NO: 9781 as a reverse primer, and an oligonucleotide comprising SEQ ID NO: 9782 as a probe.

[1013] Preferred sequences for use with RT-PCR and LightCycler analysis include SEQ ID NOs 6562, 6568, 6565, 7396 & 7397. In some embodiments of the invention, these primers and probe are excluded.

[1014] The preparation of the oligomers is by means known in the art, including, for example, by methods which include excision, transcription, or chemical synthesis. The target sequences and/or regions of the genome which are selected to which the targeting polynucleotides of the oligomers are complementary depend upon the purpose. For example, if the goal is to screen for the presence of SARSV in biological samples (e.g. blood, respiratory material, liver, lung), the preferred oligomers would be used as probes and/or primers, and would hybridize to conserved regions of the SARSV genome. Some of the conserved regions of the SARSV genome to which the oligomers may bind are described herein, for example, 5′UTR and 3′UTR.

[1015] In the basic nucleic acid hybridization assay, single-stranded analyte nucleic acid (either DNA or RNA) is hybridized to a nucleic acid probe, and resulting duplexes are detected. The probes for SARSV polynucleotides (natural or derived) are a length which allows the detection of unique viral sequences by hybridization. While 6-8 nucleotides may be a workable length, sequences of 10-12 nucleotides are preferred, and about 13, 14, 15, 16, 17, 18, 19, 20, or 21 or more nucleotides or more appears optimal. Preferably, these sequences will derive from regions which lack heterogeneity. These probes can be prepared using routine methods, including automated oligonucleotide synthetic methods. Among useful probes, for example, are those derived from less conserved regions of the SARSV genome. Regions of the genome that are typically less conserved can be readily ascertained from the sequence alignments provided herein, as well as by any other well known techniques. A complement to any unique portion of the SARSV genome will be satisfactory. For use as probes, complete complementarity is desirable, though it may be unnecessary as the length of the fragment is increased.

[1016] For use of such probes as agents to detect the presence of SARSV polynucleotides (for example in screening for contaminated blood or for diagnosing infected individuals), the biological sample to be analyzed, such as, without limitation, blood, serum, lung, liver, mucous, kidney, saliva, or sputum, may be treated, if desired, to extract the nucleic acids contained therein. The resulting nucleic acid from the sample may be subjected to gel electrophoresis or other size separation techniques; alternatively, the nucleic acid sample may be dot blotted without size separation. In order to form hybrid duplexes with the targeting sequence of the probe, the targeted region of the analyte nucleic acid must be in single stranded form. Where the sequence is naturally present in single stranded form, denaturation will not be required. However, where the sequence is present in double stranded form, the sequence will be denatured. Denaturation can be carried out by various techniques known in the art. Subsequent to denaturation, the analyte nucleic acid and probe are incubated under conditions which promote stable hybrid formation of the target sequence in the probe with the putative targeted sequence in the analyte, and the resulting duplexes containing the probe(s) are detected.

[1017] Detection of the resulting duplex, if any, is usually accomplished by the use of labeled probes; alternatively, the probe may be unlabeled, but may be detectable by specific binding with a ligand which is labeled, either directly or indirectly. Suitable labels, and methods for labeling probes and ligands are known in the art, and include, for example, radioactive labels which may be incorporated by known methods (e.g., nick translation or kinasing), biotin, fluorescent groups, chemiluminescent groups (e.g., dioxetanes, particularly triggered dioxetanes), enzymes, antibodies, and the like.

[1018] The region of the probes which are used to bind to the analyte can be made completely complementary to the SARSV genome. Therefore, usually high stringency conditions are desirable in order to prevent false positives. However, conditions of high stringency should only be used if the probes are complementary to regions of the viral genome which lack heterogeneity. The stringency of hybridization is determined by a number of factors during hybridization and during the washing procedure, including temperature, ionic strength, length of time, and concentration of formamide. These factors are outlined in, for example, Maniatis T. (1982).

[1019] Variations of this basic scheme which are known in the art, including those which facilitate separation of the duplexes to be detected from extraneous materials and/or which amplify the signal from the labeled moiety, may also be used. A number of these variations are reviewed in, for example: Matthews & Kricka (1988), Analytical Biochemistry 169:1; Landegren et al. (1988), Science 242:229; and Mittlin (1989), Clinical Chem. 35:1819. These and the following publications describing assay formats are hereby incorporated by reference herein. Probes suitable for detecting SARSV in these assays are comprised of sequences which hybridize with target SARSV polynucleotide sequences to form duplexes with the analyte strand, wherein the duplexes are of sufficient stability for detection in the specified assay system.

[1020] A suitable variation is, for example, one which is described in U.S. Pat. No. 4,868,105, issued Sep. 9, 1989, and in EPO Publication No. 225,807 (published Jun. 16, 1987). These publications describe a solution phase nucleic acid hybridization assay in which the analyte nucleic acid is hybridized to a labeling probe set and to a capturing probe set. The probe-analyte complex is coupled by hybridization with a solid-supported capture probe that is complementary to the capture probe set. This permits the analyte nucleic acid to be removed from solution as a solid phase complex. Having the analyte in the form of a solid phase complex facilitates subsequent separation steps in the assay. The labeling probe set is complementary to a labeled probe that is bound through hybridization to the solid phase/analyte complex.

[1021] The polymerase chain reaction (PCR) is a technique for amplifying a desired nucleic acid sequence (target) contained in a nucleic acid or mixture thereof. In PCR, a pair of primers are employed in excess to hybridize to the complementary strands of the target nucleic acid. The primers are each extended by a polymerase using the target nucleic acid as a template. The extension products become target sequences themselves, following dissociation from the original target strand. New primers then are hybridized and extended by a polymerase, and the cycle is repeated to geometrically increase the number of target sequence molecules. PCR is disclosed in U.S. Pat. Nos. 4,683,195 and 4,683,202, which are incorporated herein by reference.

[1022] The Ligase Chain Reaction (LCR) is an alternate method for nucleic acid amplification. In LCR, probe pairs are used which include two primary (first and second) and two secondary (third and fourth) probes, all of which are employed in molar excess to target. The first probe hybridizes to a first segment of the target strand, and the second probe hybridizes to a second segment of the target strand, the first and second segments being contiguous so that the primary probes abut one another in 5′ phosphate-3′ hydroxyl relationship, and so that a ligase can covalently fuse or ligate the two probes into a fused product. In addition, a third (secondary) probe can hybridize to a portion of the first probe and a fourth (secondary) probe can hybridize to a portion of the second probe in a similar abutting fashion. Of course, if the target is initially double stranded, the secondary probes also will hybridize to the target complement in the first instance. Once the ligated strand of primary probes is separated from the target strand, it will hybridize with the third and fourth probes which can be ligated to form a complementary, secondary ligated product. It is important to realize that the ligated products are functionally equivalent to either the target or its complement. By repeated cycles of hybridization and ligation, amplification of the target sequence is achieved. This technique is described more completely in EP-A-320 308 to K. Backman published Jun. 16, 1989 and EP-A-0439182 to K. Backman et al., published Jul. 31, 1991, both of which are incorporated herein by reference.

[1023] For amplification of mRNAs, it is within the scope of the present invention to reverse transcribe mRNA into cDNA followed by polymerase chain reaction (RT-PCR); or, to use a single enzyme for both steps as described in U.S. Pat. No. 5,322,770, which is incorporated herein by reference; or reverse transcribe mRNA into cDNA followed by asymmetric gap ligase chain reaction (RT-AGLCR) as described by R. L. Marshall et al., PCR Methods and Applications 4:80-84 (1994), which also is incorporated herein by reference.

[1024] TMA is described in detail in, e.g., U.S. Pat. No. 5,399,491, the disclosure of which is incorporated herein by reference in its entirety. In one example of a typical assay, an isolated nucleic acid sample, suspected of containing a SARSV target sequence, is mixed with a buffer concentrate containing the buffer, salts, magnesium, nucleotide triphosphates, primers, dithiothreitol, and spermidine. The reaction is optionally incubated at about 100° C. for approximately two minutes to denature any secondary structure. After cooling to room temperature, reverse transcriptase, RNA polymerase, and RNAse H are added and the mixture is incubated for two to four hours at 37° C. The reaction can then be assayed by denaturing the product, adding a probe solution, incubating 20 minutes at 60° C., adding a solution to selectively hydrolyze the unhybridized probe, incubating the reaction six minutes at 60° C., and measuring the remaining chemiluminescence in a luminometer.

[1025] Generally, TMA includes the following steps: (a) isolating nucleic acid, including RNA, from the biological sample of interest suspected of being infected with SARSV; and (b) combining into a reaction mixture (i) the isolated nucleic acid, (ii) first and second oligonucleotide primers, the first primer having a complexing sequence sufficiently complementary to the 3′ terminal portion of an RNA target sequence, if present (for example the (+) strand), to complex therewith, and the second primer having a complexing sequence sufficiently complementary to the 3′ terminal portion of the target sequence of its complement (for example, the (−) strand) to complex therewith, wherein the first oligonucleotide further comprises a sequence 5′ to the complexing sequence which includes a promoter, (iii) a reverse transcriptase or RNA and DNA dependent DNA polymerases, (iv) an enzyme activity which selectively degrades the RNA strand of an RNA-DNA complex (such as an RNAse H) and (v) an RNA polymerase which recognizes the promoter.

[1026] The components of the reaction mixture may be combined stepwise or at once. The reaction mixture is incubated under conditions whereby an oligonucleotide/target sequence is formed, including DNA priming and nucleic acid synthesizing conditions (including ribonucleotide triphosphates and deoxyribonucleotide triphosphates) for a period of time sufficient to provide multiple copies of the target sequence. The reaction advantageously takes place under conditions suitable for maintaining the stability of reaction components such as the component enzymes and without requiring modification or manipulation of reaction conditions during the course of the amplification reaction. Accordingly, the reaction may take place under conditions that are substantially isothermal and include substantially constant ionic strength and pH. The reaction conveniently does not require a denaturation step to separate the RNA-DNA complex produced by the first DNA extension reaction.

[1027] Suitable DNA polymerases include reverse transcriptases, such as avian myeloblastosis virus (AMV) reverse transcriptase (available from, e.g., Seikagaku America, Inc.) and Moloney murine leukemia virus (MMLV) reverse transcriptase (available from, e.g., Bethesda Research Laboratories).

[1028] Promoters or promoter sequences suitable for incorporation in the primers are nucleic acid sequences (either naturally occurring, produced synthetically or a product of a restriction digest) that are specifically recognized by an RNA polymerase that recognizes and binds to that sequence and initiates the process of transcription whereby RNA transcripts are produced. The sequence may optionally include nucleotide bases extending beyond the actual recognition site for the RNA polymerase which may impart added stability or susceptibility to degradation processes or increased transcription efficiency. Examples of useful promoters include those which are recognized by certain bacteriophage polymerases such as those from bacteriophage T3, T7 or SP6, or a promoter from E. coli. These RNA polymerases are readily available from commercial sources, such as New England Biolabs and Epicentre.

[1029] Some of the reverse transcriptases suitable for use in the methods herein have an RNAse H activity, such as AMV reverse transcriptase. It may, however, be preferable to add exogenous RNAse H, such as E. coli RNAse H, even when AMV reverse transcriptase is used. RNAse H is readily available from, e.g., Bethesda Research Laboratories.

[1030] The RNA transcripts produced by these methods may serve as templates to produce additional copies of the target sequence through the above-described mechanisms. The system is autocatalytic and amplification occurs autocatalytically without the need for repeatedly modifying or changing reaction conditions such as temperature, pH, ionic strength or the like.

[1031] Detection may be done using a wide variety of methods, including direct sequencing, hybridization with sequence-specific oligomers, gel electrophoresis and mass spectrometry. these methods can use heterogeneous or homogeneous formats, isotopic or nonisotopic labels, as well as no labels at all.

[1032] Suitable labeling moieties for attachment to primers and/or to probes used in methods of the invention include, but are not limited to: 5-FAM (also called 5-carboxyfluorescein; also called Spiro(isobenzofuran-1(3H), 9′-(9H)xanthene)-5-carboxylic acid,3′,6′-dihydroxy-3-oxo-6-carboxyfluorescein); 5-Hexachloro-Fluorescein ([4,7,2′,4′,5′,7′-hexachloro-(3′,6′-dipivaloylfluoresceinyl)-6-carboxylic acid]); 6-Hexachloro-Fluorescein ([4,7,2′,4′,5′,7′-hexachloro-(3′,6′-dipivaloylfluoresceinyl)-5-carboxylic acid]); 5-Tetrachloro-Fluorescein ([4,7,2′,7′-tetrachloro-(3′,6′-dipivaloylfluoresceinyl)-5-carboxylic acid]); 6-Tetrachloro-Fluorescein ([4,7,2′,7′-tetrachloro-(3′,6′-dipivaloylfluoresceinyl)-6-carboxylic acid]); tetramethylrhodamines (TAMRA), including (i) 5-TAMRA (5-carboxytetramethylrhodamine; Xanthylium, 9-(2,4-dicarboxyphenyl)-3,6-bis(dimethylamino) and (ii) 6-TAMRA (6-carboxytetramethylrhodamine; Xanthylium, 9-(2,5-dicarboxyphenyl)-3,6-bis(dimethylamino); EDANS (5-((2-aminoethyl)amino)naphthalene-1-sulfonic acid); 1,5-IAEDANS (5-((((2-iodoacetyl)amino)ethyl)amino)naphthalene-1-sulfonic acid); DABCYL (4-((4-(dimethylamino)phenyl)azo)benzoic acid); Cy5 (Indodicarbocyanine-5); Cy3 (Indodicarbocyanine-3); and BODIPY™ FL (4,4-difluoro-5,7-dimethyl-4-bora-3a,4a-diaza-s-indacene-3-propionic acid). Labelling of probes with both FAM (e.g. at 5′) and TAMRA (e.g. at 3′) is preferred.

[1033] Nucleic acids of the invention may be used in solution or may be bound to a solid matrix or support e.g. in the format of a DNA array,

[1034] As is readily apparent, design of the assays described herein are subject to a great deal of variation, and many formats are known in the art. The above descriptions are merely provided as guidance and one of skill in the art can readily modify the described protocols, using techniques well known in the art.

[1035] One 302nt amplicon of the SARS virus is known as “BNI-1” (SEQ ID NO: 9927). It was sequenced at the Bernhard Nocht Institute, Hamburg, Germany. In April 2003 the BNI-1 sequence was published on the WHO website (http://www.who.int/csr/sars/primers/en/) and in Dorsten et al., “Identification of a Novel Coronavirus in Patients with Severe Acute Respiratory Syndrome”, New England Journal of Medicine, published online at http://www.nejm.org. Both references are incorporated herein by reference in their entirety. Some embodiments of the invention do not encompass a nucleic acid consisting of SEQ ID NO: 9927. Some other embodiments of the invention do not encompass a nucleic acid comprising SEQ ID NO: 9927. Some embodiments of the invention do not encompass a polypeptide consisting of any one of SEQ ID NO^{S}: 9928 to 9959. Some other embodiments of the invention do not encompass a nucleic acid comprising any one of SEQ ID NOs: 9928 to 9959. Some embodiments of the invention are not subject to these exclusions.

Immunoassays

[1036] The present invention utilizes various immunoassay techniques for identifying individuals exposed to SARSV and/or biological samples containing SARSV antigens or antibodies to SARSV.

Immunoassay Formats

[1037] The SARSV antigens may be employed in virtually any assay format that employs a known antigen to detect antibodies. A common feature of all of these assays is that the antigen is contacted with biological sample suspected of containing SARSV antibodies under conditions that permit the antigen to bind to any such antibody present in the component. Such conditions will typically be physiologic temperature, pH and ionic strength using an excess of antigen. The incubation of the antigen with the specimen is followed by detection of immune complexes comprised of the antigen. Alternatively, anti-SARSV antibodies may be employed to detect the presence of SARSV antigens in a biological sample. Combination antigen/antibody assays are also contemplated; for example, as described for HCV detection in US patent 6,630,298.

[1038] Design of the immunoassays is subject to a great deal of variation, and many formats are known in the art. Protocols may, for example, use solid supports, or immunoprecipitation. Most assays involve the use of labeled antibody or polypeptide; the labels may be, for example, enzymatic, fluorescent, chemiluminescent, radioactive, or dye molecules. Assays which amplify the signals from the immune complex are also known; examples of which are assays which utilize biotin and avidin, and enzyme-labeled and mediated immunoassays, such as ELISA assays.

[1039] The immunoassay may be, without limitation, in a heterogeneous or in a homogeneous format, and of a standard or competitive type. In a heterogeneous format, the polypeptide is typically bound to a solid matrix or support to facilitate separation of the sample from the polypeptide after incubation. Examples of solid supports that can be used are nitrocellulose (e.g., in membrane or microtiter well form), polyvinyl chloride (e.g., in sheets or microtiter wells), polystyrene latex (e.g., in beads or microtiter plates, polyvinylidine fluoride, diazotized paper, nylon membranes, microchips, high or low density biochips, recombinant immunoassays (RIBA), microfluidity devices, micromagnetic beads, activated beads, and Protein A beads. For example, Dynatech Immunlon or Immunlon 2 microtiter plates or 0.25 inch polystyrene beads (Precision Plastic Ball) can be used in the heterogeneous format. The solid support containing the antigenic polypeptides is typically washed after separating it from the test sample, and prior to detection of bound antibodies. Both standard and competitive formats are known in the art.

[1040] In a homogenous format, the test sample is incubated with the combination of antigens in solution. For example, it may be under conditions that will precipitate any antigen-antibody complexes which are formed. Both standard and competitive formats for these assays are known in the art.

[1041] In a standard format, the amount of SARSV antibodies in the antibody-antigen complexes is directly monitored. This may be accomplished by determining whether labeled anti-xenogeneic (e.g., anti-human) antibodies which recognize an epitope on anti-SARSV antibodies will bind due to complex formation. In a competitive format, the amount of SARSV antibodies in the sample is deduced by monitoring the competitive effect on the binding of a known amount of labeled antibody (or other competing ligand) in the complex.

[1042] Complexes formed comprising anti-SARSV antibody (or in the case of competitive assays, the amount of competing antibody) are detected by any of a number of known techniques, depending on the format. For example, unlabeled SARSV antibodies in the complex may be detected using a conjugate of antixenogeneic Ig complexed with a label, (e.g., an enzyme label).

[1043] In an immunoprecipitation or agglutination assay format the reaction between the SARSV antigens and the antibody forms a network that precipitates from the solution or suspension and forms a visible layer or film of precipitate. If no anti-SARSV antibody is present in the test specimen, no visible precipitate is formed.

[1044] There are at least three specific types of particle agglutination (PA) assays. These assays are used for the detection of antibodies to various antigens when coated to a support. One type of this assay is the hemagglutination assay using red blood cells (RBCs) that are sensitized by passively adsorbing antigen (or antibody) to the RBC. The addition of specific antigen antibodies present in the body component, if any, causes the RBCs coated with the purified antigen to agglutinate.

[1045] To eliminate potential non-specific reactions in the hemagglutination assay, two artificial carriers may be used instead of RBC in the PA. The most common of these are latex particles. However, gelatin particles may also be used. The assays utilizing either of these carriers are based on passive agglutination of the particles coated with purified antigens.

[1046] The SARSV antigens will typically be packaged in the form of a kit for use in these immunoassays. The kit will normally contain in separate containers the native SARSV antigen, control antibody formulations (positive and/or negative), labeled antibody when the assay format requires same and signal generating reagents (e.g., enzyme substrate) if the label does not generate a signal directly. The native SARSV antigen may be already bound to a solid matrix or separate with reagents for binding it to the matrix. Instructions (e.g., written, tape, CD-ROM, etc.) for carrying out the assay usually will be included in the kit.

[1047] Immunoassays that utilize the native SARSV antigen are additionally useful in screening blood for the preparation of a supply from which potentially infective SARSV is lacking. The method for the preparation of the blood supply comprises the following steps. Reacting a body component, preferably blood or a blood component, from the individual donating blood with native SARSV antigen to allow an immunological reaction between SARSV antibodies, if any, and the SARSV antigen. Detecting whether anti-SARSV antibody-SARSV antigen complexes are formed as a result of the reacting. Blood contributed to the blood supply is from donors that do not exhibit antibodies to the native SARSV antigens.

Production of Antibodies

[1048] As explained above, the assay may utilize various antibodies which may be bound to a solid support, and that detect antigen or antigen/antibody complexes formed when SARSV infection is present in the sample. These antibodies may be polyclonal or monoclonal antibody preparations, monospecific antisera, human antibodies, or may be hybrid or chimeric antibodies, such as humanized antibodies, altered antibodies, F(ab′)₂ fragments, F(ab) fragments, Fv fragments, single-domain antibodies, dimeric or trimeric antibody fragment constructs, minibodies, or functional fragments thereof which bind to the antigen in question.

[1049] Antibodies are produced using techniques well known to those of skill in the art and disclosed in, for example, U.S. Pat. Nos. 4,011,308; 4,722,890; 4,016,043; 3,876,504; 3,770,380; and 4,372,745. For example, polyclonal antibodies are generated by immunizing a suitable animal, such as a mouse, rat, rabbit, sheep or goat, with an antigen of interest. In order to enhance immunogenicity, the antigen can be linked to a carrier prior to immunization. Such carriers are well known to those of ordinary skill in the art. Immunization is generally performed by mixing or emulsifying the antigen in saline, preferably in an adjuvant such as Freund's complete adjuvant, and injecting the mixture or emulsion parenterally (generally subcutaneously or intramuscularly). The animal is generally boosted 2-6 weeks later with one or more injections of the antigen in saline, preferably using Freund's incomplete adjuvant. Antibodies may also be generated by in vitro immunization, using methods known in the art. Polyclonal antiserum is then obtained from the immunized animal.

[1050] Monoclonal antibodies are generally prepared using the method of Kohler & Milstein (1975) Nature 256:495-497, or a modification thereof, as described above.

[1051] As explained above, antibody fragments which retain the ability to recognize the antigen of interest, will also find use in the subject immunoassays. A number of antibody fragments are known in the art which comprise antigen-binding sites capable of exhibiting immunological binding properties of an intact antibody molecule. For example, functional antibody fragments can be produced by cleaving a constant region, not responsible for antigen binding, from the antibody molecule, using e.g., pepsin, to produce F(ab′)₂ fragments. These fragments will contain two antigen binding sites, but lack a portion of the constant region from each of the heavy chains. Similarly, if desired, Fab fragments, comprising a single antigen binding site, can be produced, e.g., by digestion of polyclonal or monoclonal antibodies with papain. Functional fragments, including only the variable regions of the heavy and light chains, can also be produced, using standard techniques such as recombinant production or preferential proteolytic cleavage of immunoglobulin molecules. These fragments are known as Fv. See, e.g., Inbar et al. (1972) Proc. Nat. Acad. Sci. USA 69:2659-2662; Hochman et al. (1976) Biochem 15:2706-2710; and Ehrlich et al. (1980) Biochem 19:4091-4096.

[1052] A single-chain Fv (“sFv” or “scFv”) polypeptide is a covalently linked V_{H}-V_{L} heterodimer which is expressed from a gene fusion including V_{H}- and V_{L}-encoding genes linked by a peptide-encoding linker. Huston et al. (1988) Proc. Nat. Acad. Sci. USA 85:5879-5883. A number of methods have been described to discern and develop chemical structures (linkers) for converting the naturally aggregated, but chemically separated, light and heavy polypeptide chains from an antibody V region into an sFv molecule which will fold into a three dimensional structure substantially similar to the structure of an antigen-binding site. See, e.g., U.S. Pat. Nos. 5,091,513, 5,132,405 and 4,946,778. The sFv molecules may be produced using methods described in the art. See, e.g., Huston et al. (1988) Proc. Nat. Acad. Sci. USA 85:5879-5883; U.S. Pat. Nos. 5,091,513, 5,132,405 and 4,946,778. Design criteria include determining the appropriate length to span the distance between the C-terminus of one chain and the N-terminus of the other, wherein the linker is generally formed from small hydrophilic amino acid residues that do not tend to coil or form secondary structures. Such methods have been described in the art. See, e.g., U.S. Pat. Nos. 5,091,513, 5,132,405 and 4,946,778. Suitable linkers generally comprise polypeptide chains of alternating sets of glycine and serine residues, and may include glutamic acid and lysine residues inserted to enhance solubility.

[1053] “Mini-antibodies” or “minibodies” will also find use with the present invention. Minibodies are sFv polypeptide chains which include oligomerization domains at their C-termini, separated from the sFv by a hinge region. Pack et al. (1992) Biochem 31:1579-1584. The oligomerization domain comprises self-associating a-helices, e.g., leucine zippers, that can be further stabilized by additional disulfide bonds. The oligomerization domain is designed to be compatible with vectorial folding across a membrane, a process thought to facilitate in vivo folding of the polypeptide into a functional binding protein. Generally, minibodies are produced using recombinant methods well known in the art. See, e.g., Pack et al. (1992) Biochem 31:1579-1584; Cumber et al. (1992) J. Immunology 149B: 120-126.

Production of SARS Antigens

[1054] The SARSV antigens used in the present invention are generally produced recombinantly. Thus, polynucleotides encoding SARSV antigens for use with the present invention can be made using standard techniques of molecular biology. For example, polynucleotide sequences coding for the above-described molecules can be obtained using recombinant methods, such as by screening cDNA and genomic libraries from cells expressing the gene, or by deriving the gene from a vector known to include the same. Furthermore, the desired gene can be isolated directly from viral nucleic acid molecules, using techniques described in the art, such as those described for HCV in Houghton et al., U.S. Pat. No. 5,350,671. The gene encoding the antigen of interest can also be produced synthetically, rather than cloned. The molecules can be designed with appropriate codons for the particular sequence (preferably optimum codons for the expression host of choice). The complete sequence is then assembled from overlapping oligonucleotides prepared by standard methods and assembled into a complete coding sequence. See, e.g., Edge (1981) Nature 292:756; Nambair et al. (1984) Science 223:1299; and Jay et al. (1984) J. Biol. Chem. 259:6311.

[1055] Thus, particular nucleotide sequences can be obtained from vectors harboring the desired sequences or synthesized completely or in part using various oligonucleotide synthesis techniques known in the art, such as site-directed mutagenesis and polymerase chain reaction (PCR) techniques where appropriate. See, e.g., Sambrook, supra. In particular, one method of obtaining nucleotide sequences encoding the desired sequences is by annealing complementary sets of overlapping synthetic oligonucleotides produced in a conventional, automated polynucleotide synthesizer, followed by ligation with an appropriate DNA ligase and amplification of the ligated nucleotide sequence via PCR. See, e.g., Jayaraman et al. (1991) Proc. Natl. Acad. Sci. USA 88:4084-4088. Additionally, oligonucleotide directed synthesis (Jones et al. (1986) Nature 54:75-82), oligonucleotide directed mutagenesis of pre-existing nucleotide regions (Riechmann et al. (1988) Nature 332:323-327 and Verhoeyen et al. (1988) Science 239:1534-1536), and enzymatic filling-in of gapped oligonucleotides using T4 DNA polymerase (Queen et al. (1989) Proc. Natl. Acad. Sci. USA 86:10029-10033) can be used under the invention to provide molecules having altered or enhanced antigen-binding capabilities, and/or reduced immunogenicity.

[1056] Once coding sequences have been prepared or isolated, such sequences can be cloned into any suitable vector or replicon. Numerous cloning vectors are known to those of skill in the art, and the selection of an appropriate cloning vector is a matter of choice. Suitable vectors include, but are not limited to, plasmids, phages, transposons, cosmids, chromosomes (including artificial chromosomes, such as BACs or YACs) or viruses which are capable of replication when associated with the proper control elements.

[1057] The coding sequence is then placed under the control of suitable control elements, depending on the system to be used for expression. Thus, the coding sequence can be placed under the control of a promoter, ribosome binding site (for bacterial expression) and, optionally, an operator, so that the DNA sequence of interest is transcribed into RNA by a suitable transformant. The coding sequence may or may not contain a signal peptide or leader sequence which can later be removed by the host in post-translational processing. See, e.g., U.S. Pat. Nos. 4,431,739; 4,425,437; 4,338,397.

[1058] In addition to control sequences, it may be desirable to add regulatory sequences which allow for regulation of the expression of the sequences relative to the growth of the host cell. Regulatory sequences are known to those of skill in the art, and examples include those which cause the expression of a gene to be turned on or off in response to a chemical or physical stimulus, including the presence of a regulatory compound. Other types of regulatory elements may also be present in the vector. For example, enhancer elements may be used herein to increase expression levels of the constructs. Examples include the SV40 early gene enhancer (Dijkema et al. (1985) EMBO J 4:761), the enhancer/promoter derived from the long terminal repeat (LTR) of the Rous Sarcoma Virus (Gorman et al. (1982) Proc. Natl. Acad. Sci. USA 79:6777) and elements derived from human CMV (Boshart et al. (1985) Cell 41:521), such as elements included in the CMV intron A sequence (U.S. Pat. No. 5,688,688). The expression cassette may further include an origin of replication for autonomous replication in a suitable host cell, one or more selectable markers, one or more restriction sites, a potential for high copy number and a strong promoter.

[1059] An expression vector is constructed so that the particular coding sequence is located in the vector with the appropriate regulatory sequences, the positioning and orientation of the coding sequence with respect to the control sequences being such that the coding sequence is transcribed under the “control” of the control sequences (i.e., RNA polymerase which binds to the DNA molecule at the control sequences transcribes the coding sequence). Modification of the sequences encoding the molecule of interest may be desirable to achieve this end. For example, in some cases it may be necessary to modify the sequence so that it can be attached to the control sequences in the appropriate orientation; i.e., to maintain the reading frame. The control sequences and other regulatory sequences may be ligated to the coding sequence prior to insertion into a vector. Alternatively, the coding sequence can be cloned directly into an expression vector which already contains the control sequences and an appropriate restriction site.

[1060] As explained above, it may also be desirable to produce mutants or analogs of the antigen of interest. Methods for doing so are described in, e.g., Dasmahapatra et al., U.S. Pat. No. 5,843,752 and Zhang et al., U.S. Pat. No. 5,990,276. Mutants or analogs of SARSV proteins for use in the subject assays may be prepared by the deletion of a portion of the sequence encoding the polypeptide of interest, by insertion of a sequence, and/or by substitution of one or more nucleotides within the sequence. Techniques for modifying nucleotide sequences, such as site-directed mutagenesis, and the like, are well known to those skilled in the art. See, e.g., Sambrook et al., supra; Kunkel, T. A. (1985) Proc. Natl. Acad. Sci. USA (1985) 82:448; Geisselsoder et al. (1987) BioTechniques 5:786; Zoller & Smith (1983) Methods Enzymol. 100:468; Dalbie-McFarland et al. (1982) Proc. Natl. Acad. Sci USA 79:6409.

[1061] The molecules can be expressed in a wide variety of systems, including insect, mammalian, bacterial, viral and yeast expression systems, all well known in the art.

[1062] For example, insect cell expression systems, such as baculovirus systems, are known to those of skill in the art and described in, e.g., Summers & Smith, Texas Agricultural Experiment Station Bulletin No. 1555 (1987). Materials and methods for baculovirus/insect cell expression systems are commercially available in kit form from, inter alia, Invitrogen, San Diego Calif. (“MaxBac” kit). Similarly, bacterial and mammalian cell expression systems are well known in the art and described in, e.g., Sambrook et al., supra. Yeast expression systems are also known in the art and described in, e.g., Yeast Genetic Engineering (Barr et al., eds., 1989) Butterworths, London.

[1063] A number of appropriate host cells for use with the above systems are also known. For example, mammalian cell lines are known in the art and include immortalized cell lines available from the American Type Culture Collection (ATCC), such as, but not limited to, Chinese hamster ovary (CHO) cells, HeLa cells, baby hamster kidney (BHK) cells, monkey kidney cells (COS), human embryonic kidney cells, human hepatocellular carcinoma cells (e.g., Hep G2), Madin-Darby bovine kidney (“MDBK”) cells, as well as others. Similarly, bacterial hosts such as E. coli, Bacillus subtilis, and Streptococcus spp., will find use with the present expression constructs. Yeast hosts useful in the present invention include inter alia, Saccharomyces cerevisiae, Candida albicans, Candida maltosa, Hansenula polymorpha, Kluyveromyces fragilis, Kluyveromyces lactis, Pichia guillerimondii, Pichia pastoris, Schizosaccharomyces pombe and Yarrowia lipolytica. Insect cells for use with baculovirus expression vectors include, inter alia, Aedes aegypti, Autographa califormica, Bombyx mori, Drosophila melanogaster, Spodoptera frugiperda, and Trichoplusia ni.

[1064] Nucleic acid molecules comprising nucleotide sequences of interest can be stably integrated into a host cell genome or maintained on a stable episomal element in a suitable host cell using various gene delivery techniques well known in the art. See, e.g., U.S. Pat. No. 5,399,346.

[1065] Depending on the expression system and host selected, the molecules are produced by growing host cells transformed by an expression vector described above under conditions whereby the protein is expressed. The expressed protein is then isolated from the host cells and purified. If the expression system secretes the protein into growth media, the product can be purified directly from the media. If it is not secreted, it can be isolated from cell lysates. The selection of the appropriate growth conditions and recovery methods are within the skill of the art.

### EXAMPLE

[1066] For useful expression of SARSV antigens in Saccharomyces cerevisiae and Pichia pastoris, insect cells, and mammalian cells, the following domains are cloned into expression vectors as listed in the Table below. The nt sequence numbers are from the SARSV sequence of SEQ ID NO: 1.
[1067] RNA polymerase 1a: SARS nt 250-13398
[1068] RNA polymerase 1b: SARS nt 13399-21470
[1069] ORFns.envelope (homologous to ns2, hemagglutinin-esterase envelope glycoprotein, and spike glycoprotein): SARS nt 21477-25244
[1070] Membrane: SARS nt 27849-28103
[1071] Nucleocapsid: SARS nt 28105-29373

[1072] A combination of PCR and synthetic oligos is used to create the above domains with restriction sites tailored to the following expression vectors:

| Restriction ends | Vector | Promoter | Expression host |
|---|---|---|---|
| HindIII/SalI | pBS24.1 | ADH2/GAPDH | AD3/Saccharomyces |
| EcoRI/Sal\\\ | pBS24.1 | ADH2/GAPDH/SOD fusion | AD3/Saccharomyces |
| XbaI/SalI | pAO815 | AOXI | GS115/Pichia pastoris |
| | | | HVK-293/Transient |
| EcoRI/BamHI | pCMVkm2 | CMVp/Enhancer/IntronA | transfection |
| EcoRI/XmaI | pCMVIII | CMVp/Enhancer/IntronA | CHO stable cell line |
| | | | Cell lines employed by Chiron |
| NheI/SalI | pBluBac4.5 | Polyhedrin | include: Sf9, Sf21, Tn5 |

IV. Treatment of SARS Infection With RNAi

[1073] RNA interference or “RNAi” is a term initially coined by Fire and co-workers to describe the observation that double-stranded RNA (dsRNA) can block gene expression when it is introduced into worms (Fire et al., Nature 391, 806-811(1998)). RNAi most likely involves mRNA degradation, resulting in sequence-specific, post-transcriptional gene silencing in many organisms. RNAi is a post-transcriptional process triggered by the introduction of double-stranded RNA which leads to gene silencing in a sequence-specific manner. RNAi has been reported to occur naturally in organisms as diverse as nematodes, trypanosmes, plants and fungi. It most likely serves to protect organisms from viruses, modulate transposon activity and eliminate aberrant transcription products.

[1074] The first evidence that dsRNA could achieve efficient gene silencing through RNAi came from studies on the nematode Caenorhabditis elegans (Fire et al. (1998) Nature, 391:806-811 and U.S. Pat. No. 6,506,559). Later studies in the fruit fly Drosophila melanogaster demonstrated that RNAi is a two-step mechanism (Elbashir et al. (2001) Genes Dev., 15(2): 188-200). First, long dsRNAs are cleaved by an enzyme known as Dicer in 21-23 nucleotides (nt) fragments, called small interfering RNAs (siRNAs). Then, siRNAs associate with a ribonuclease complex (termed RISC for RNA Induced Silencing Complex) which target this complex to complementary mRNAs. RISC then cleaves the targeted mRNAs opposite the complementary siRNA, which makes the mRNA susceptible to other RNA degradation pathways.

[1075] RNAi is the phenomenon where dsRNA corresponding to a targeted DNA or RNA sequence can suppress or silence gene expression. Even though dsRNA can mediate gene-specific interference in mammalian cells in some circumstances (Wianny & Zernicka-Goetz (2000) Nature Cell Biol. 2:70-75; Svoboda et al. (2000) Development 17:4147-4156) the use of RNAi in mammalian somatic cells is often limited due to the dsRNA triggering dsRNA-dependent protein kinase (PKR) which in turn inactivates translation factor eIF2a and causes a generalized suppression of protein synthesis and often times apoptosis (Gil & Esteban (2000) Apoptosis 5:107-114).

[1076] Recently, gene-specific suppression using siRNA of approximately 21 or 22 base pairs in length, corresponding to targeted RNA or DNA sequences, were shown to disrupt the expression of these targeted sequences in mammalian cells (Elbashir, S. M., et al., Nature 411: 494-498 (2001)). However, it is not clear that all RNA or DNA sequences of a mammalian cell's genome are susceptible to siRNA. It is also uncertain that every mammalian cell type possesses the necessary machinery for effecting gene-specific suppression using siRNA. Further, siRNA is of limited use for at least two reasons: the transient nature of the suppression effect seen in cells where the siRNA has been administered; and in some instances the necessity for chemical synthesis of siRNAs before their use (Tuschl T., Nature Biotechnol., 20: 446-448 (2002)). Also the instability of these short, synthetic RNAs makes it presents problems for any long term use of these siRNAs a pharmaceutical.

[1077] To overcome this limitation, the present invention provides a modified siRNA with increased stability against nuclease degradation while still maintaining its ability to inhibit viral replication via RNA interference. Such modification to the ribonucleotides in the siRNAs, adds a chemical group via chemical synthesis or in vitro transcription or longer modified RNAs can be prepared by either of these methods and cut into siRNAs using Dicer.

[1078] Although other methods for gene-specific suppression have utilized chemically-modified nucleic acids, such as antisense and ribozyme technology, such modification destroys critical enzymatic activities necessary for the function of these technologies. In regard to antisense technology, modification of the ribonucleotides destroys RNaseH activity, whereas such modification abolishes the catalytic activity of ribozymes.

[1079] The present invention provides a double-stranded RNA (dsRNA) molecule modified for protection against nuclease degradation with a length from about 10 to about 30 nucleotides which is able to inactivate a virus in a mammalian cell. The invention also provides a method of inactivating a virus by administering modified small interfering RNAs (siRNAs) that are modified so that they are nuclease or RNase resistant and retain the biological activity of being able to inhibit viral replication by targeting a RNA sequence in a virus.

[1080] The invention is further directed to a method of making modified siRNAs that target a RNA sequence in a virus comprising preparing a modified-double stranded RNA (dsRNA) fragment containing at least one modified ribonucleotide in at least one strand that spans the genome of the virus; and cleaving the modified-dsRNA fragments with recombinant human Dicer resulting in more than one modified siRNA.

[1081] The present invention provides a modified dsRNA molecule of from about 10 to about 30 nucleotides which mediates targeted RNA interference in hepatic or SARS-infected cells.

[1082] As used herein RNA interference, or RNAi, is used to mean sequence-specific, or gene specific, suppression of gene expression (protein synthesis), without causing a generalized suppression of protein synthesis in cells harboring the siRNA. The invention is not limited to a particular theory of the mechanism of action of RNAi. For example, RNAi may involve degradation of messenger RNA (mRNA) in an RNA-induced silencing complex (RISC), preventing translation of the transcribed mRNA, or it may involve the methylation of genomic DNA, shunting transcription of the gene. The lack of gene expression caused by RNAi may be transient, lasting a short period of time, or it may be stable, or permanent, lasting an indefinite period of time.

[1083] The term RNA is meant as is recognized in the art. Further, as used herein, RNA is used to mean double-stranded RNA (dsRNA) or single-stranded RNA (ssRNA) or a dsRNA with a single-stranded overhang. dsRNAs-within the meaning of the present invention includes short interfering RNA (siRNA), micro RNA (miRNA) and small hairpin RNA (shRNA), Additionally, RNA is also used to mean messenger RNA (mRNA), transfer RNA (tRNA) or ribosomal RNA (rRNA).

[1084] The present invention is directed to small interfering RNA (siRNA) which have been chemically modified to confer increased stability against nuclease degradation yet these siRNAs are still able to bind to target RNAs, that may be present in a cells. In the case where the target RNA is a virus specific RNA, the modified siRNAs are able to bind to the virus specific RNAs and inactivate the virus. A modified siRNA of the present invention comprises a modified ribonucleotide, wherein the siRNA is resistant to enzymatic degradation, such as RNase degradation, and yet retains the ability to inhibit viral replication. The modified siRNA is more specifically modified at the 2′ position of the ribose in the siRNA. The modification is at the 2′ position of at least one ribonucleotide of said siRNA. Attachment of receptor-binding ligands to siRNA molecules can be used to target the siRNA to a desired cell type. For example, attachment of cholesterol at the 5′-end or 3′-end of the siRNA molecule, to give a cholesteryl siRNA, can enhance targeting to hepatocytes. Other ligands for receptor mediated siRNA targeting to liver include HBV surface antigen, LDL, and others.

[1085] More specifically, the siRNA is modified at at least one pyrimidine, at least one purine or a combination thereof. However, generally all pyrimidines, or all purines or a combination of all pyrimidines and all purines of the siRNA are modified. More preferably, the pyrimidines are modified and these pyrimidines are cytosine, a derivative of cytosine, uracil, a derivative of uracil or a combination thereof. It also is contemplated to modify the selected ribonucleotides in at least one strand of the siRNA or the ribonucleotides in both strands of the siRNA are modified.

[1086] The nucleotides containing pyrimidine bases found in RNA (cytidine and uridine) can be chemically modified by adding any molecule that inhibits RNA degradation or breakdown to the 2′ position of the ribose molecule. The 2′-modified pyrimidine nucleotide can be formed using a number of different methods. The 2′ modification confers increased stability to the siRNA by making the siRNA impervious or resistant to nuclease activity. Thus, the 2′ modified siRNA has a longer serum half-life and is resistant to degradation compared to unmodified siRNA. The siRNA also may be modified completely or partially.

[1087] Regarding chemical modification of siRNAs, a molecule from the halide chemical group is preferably added to the ribonucleotide of the siRNA. Within the halides, fluorine is the preferred molecule but other chemical molecules, in addition to fluoro-, such as methyl-, methoxyethyl- and propyl-modifications can also we made. But the preferred modications is fluoro-modification, such as a 2′-fluoro-modication or a 2′,2′-fluoro-modification. Thus, in a preferred embodiment of the invention, the siRNA is modified by adding a fluorine molecule to the 2′ carbon of the pyrimidine ribonucleotide. The siRNA may be fluorinated completely or partially. For example, only the cytosine nucleotides need be fluorinated. Alternatively, only the uracil nucleotide need be fluorinated but both uracil and cytosine can be fluorinated. Furthermore, only one strand, either sense or antisense, of the siRNA can be fluorinated. Even partial 2′ fluorination the siRNA gives protection against nucleolytic degradation. Furthermore, it is important to note the 2′ fluorinated siRNA is not toxic to cells, an unexpected result given that fluorine chemistry usually is toxic to living organisms.

[1088] The siRNA of the present invention is designed to interact with a target nucleotide sequence. Most preferably this target nucleotide sequence is a disease producing agent or pathogen of which one wishes to inhibit gene expression. More preferably, this target nucleotide sequence is in a virus genome, and further this virus genome is from a RNA virus or a DNA virus is selected from the group consisting of hepatitis C virus (HCV), hepatitis A virus, hepatitis B virus, hepatitis D virus, hepatitis E virus, Ebola virus, influenza virus, rotavirus, reovirus, retrovirus, poliovirus, human papilloma virus (HPV), metapneumovirus and coronavirus. The most preferred virus is SARS virus.

[1089] Modfied siRNA may be prepared in a number of ways, such as by chemical synthesis, T7 polymerase transcription, or by treating modified long double stranded RNA (dsRNA) prepared by one of the two previous methods with Dicer enzyme. Dicer enzyme can be used to cleave dsRNA that is about 500 base pairs to about 1000 base pairs in size, to created mixed populations of dsRNA from about 21 to about 23 base pairs in length. Furthermore, an unexpected result of using the Dicer enzyme method is that Dicer enzyme will cleave modified strands of dsRNA, such as 2′ fluorinated modified dsRNA. Before development of this method, it was previously thought that Dicer would not be able to cleave modified siRNA. The Dicer method can be carried out using the Dicer siRNA Generation Kit available from Gene Therapy Systems, San Diego, Calif.

[1090] As used herein, small interfering RNA (siRNA) is defined as double- or single-stranded RNA of from about 10 to about 30 nucleotides in length, more preferably 12-28 nucleotides, more preferably 15-25 nucleotides, even more preferably 19-23 nucleotides and most preferably 21-23 nucleotides. The length of a siRNA as used herein, is determined by the length of one of the strands of the RNA. For example, a siRNA that is described as 21 nucleotides long (a 21-mer) may comprise two opposite strands of RNA which anneal together for 19 contiguous base pairings. The two remaining nucleotides on one end of the molecule would not anneal to the opposite strand, thus creating an “overhang”. The overhang can be at the 5′ or the 3′ end of the dsRNA. Preferably, the overhang is at the 3′ end of the RNA strand. The length of a double-stranded RNA where the two opposite strands are not the same length will be designated by the longer of the two strands. For example, a dsRNA comprising one strand which is 21 nucleotides long and anneals to an opposite strand that is 20 nucleotides long, will be considered, as used herein, a 21-mer.

[1091] Preferably, the siRNA of the present invention will comprise a 3′ overhang of about 2 to 4 bases. More preferably, the 3′ overhang is 2 nucleotides long. Even more preferably, the 2 nucleotides comprising the 3′ overhang are uridine (U).

[1092] In one embodiment, the invention provides an RNA molecule comprising a nucleotide sequence at least 80% identical to the nucleotide sequence of the target agent or virus. Preferably, the RNA molecule of the present invention is at least 90%, 95%, 96%, 97%, 98%, 99% or 100% identical to the nucleotide sequence of the target agent or virus.

[1093] As a practical matter, whether any particular nucleic acid molecule is at least 90%, 95%, 96%, 97% 98%, 99% or 100% identical to the nucleotide sequence of the target agent or virus can be determined conventionally using known computer programs such as the Bestfit program (Wisconsin Sequence Analysis Package, Version 8 for Unix, Genetics Computer Group, University Research Park, 575 Science Drive, Madison, Wis. 53711). Bestfit uses the local homology algorithm of Smith & Waterman (Advances in Applied Mathematics 2:482-489 (1981)) to find the best segment of homology between two sequences. When using Bestfit or any other sequence alignment program to determine whether a particular sequence is, for instance, 95% identical to a reference sequence according to the present invention, the parameters are set, of course, such that the percentage of identity is calculated over the full length of the reference nucleotide sequence and that gaps in homology of up to 5% of the total number of nucleotides in the reference sequence are allowed.

[1094] The present invention provides a method of inactivating a target agent or preferably a virus in a patient comprising administering to the patient a modified siRNA in an effective amount to inactivate the targeted agent or virus. RNA interference towards a targeted DNA segment in a cell can be achieved by administering a dsRNA molecule or siRNA to the cells, wherein the nucleotide sequence of the dsRNA molecule corresponds to the nucleotide sequence of the targeted DNA segment. Preferably, the RNA molecule used to induce targeted RNAi is siRNA.

[1095] Gene suppression, targeted suppression, sequence-specific suppression, targeted RNAi or sequence-specific RNAi are used interchangeably herein. Furthermore, sequence-specific suppression, as used herein, is determined by separately assaying the levels of the protein targeted for suppression in cells containing the siRNA (experimental cells) and in cells not containing the identical siRNA (control cells), and comparing the two values. Furthermore, the experimental and control cells must be derived from the same source and same animal. For example, the control and experimental cells can be, but are not limited to, normal human hepatic cells as cell culture in vitro, or they can derived from a hepatocellular carcinoma. Further, the control and experimental cells used in determining the level or quantity of gene suppression must be assayed under similar, if not identical, conditions.

[1096] As used herein the phrase “targeted DNA segment” is used to mean a DNA sequence encoding, in whole or in part, an mRNA for a targeted protein, including introns or exons, where suppression is desired. DNA segment can also mean a DNA sequence that normally regulates expression of the targeted protein, including but not limited to the promoter of the targeted protein. Furthermore, the DNA segment may or may not be a part of the cell's genome or it may be extrachromosomal, such as plasmid DNA.

[1097] The present invention is further directed to inactivating a virus in a patient comprising administering to a patient a modified siRNA in an effective amount to inactivate the virus. The siRNA is preferably about 10 to about 30 nucleotides in length, more preferably 12-28 nucleotides, more preferably 15-25 nucleotides, even more preferably 19-23 nucleotides and most preferably 21-23 nucleotides. The method preferably utilizes a 2′ modified siRNA that is modified at the 2′ position of at least one ribonucleotide of said siRNA. The method utilizes a siRNA that is modified with chemical groups selected from the group consisting of fluoro-, methyl-, methoxyethyl- and propyl-modification. The fluoro-modification is preferred and either a 2′-fluoro-modication or a 2′,2′-fluoro-modification is useful in the present invention and preferred.

[1098] The modification may be at the pyrimidines, the purines or a combination thereof of the siRNA are modified. More preferably the pyrimidines are modified, such as cytosine, a derivative of cytosine, uracil, a derivative of uracil or a combination thereof. In one embodiment, at least one strand of the siRNA contains at least one modified nucleotide and in an alternate embodiment, oth strands of the siRNA contains at least one modified nucleotide.

[1099] The method is intended to target disease causing agents or pathogens, an more particularly viruses, which can be either a RNA virus or a DNA virus, which are selected from the group consisting of hepatitis C virus (HCV), hepatitis A virus, hepatitis B virus, hepatitis D virus, hepatitis E virus, Ebola virus, influenza virus, rotavirus, reovirus, retrovirus, poliovirus, human papilloma virus (HPV), metapneumovirus and coronavirus. More preferably the target virus is a SARS virus. The present method utilizes a siRNA prepared by (a) identifying a target nucleotide sequence in a virus genome, preferably SARS virus, for designing a small interfering RNA (siRNA); and (b) producing a siRNA that has been modified to contain at least one modified nucleotide. More preferably, the siRNA comprises a dsRNA molecule with a first strand ribonucleotide sequence corresponding to a nucleotide sequence corresponding to a target nucleotide sequence in said virus and a second strand comprising a ribonucleotide sequence complementary to said target nucleotide sequence, wherein said first and second strands are separate complementary strands that hybridize to each other to form said dsRNA molecule, and further wherein the first strand ribonucleotide sequence, the second strand ribonucleotide sequence or both the first and second strand ribonucletide sequences comprise at least one modified nucleotide. In this method, the target nucleotide sequence comprises a conserved nucleotide sequence necessary for SARS virus replication, and the conserved nucleotide sequence is selected from the group consisting of SEQ ID NO: 7292, SEQ ID NO: 7293, SEQ ID NO: 7294, SEQ ID NO: 7295, SEQ ID NO: 7296, SEQ ID NO: 7297, SEQ ID NO: 7298, SEQ ID NO: 7299, SEQ ID NO: 7300 and SEQ ID NO: 7301. Preferably, the nucleotide sequence is selected from the group consisting of SEQ ID NO: 7292 and SEQ ID NO: 7293. Still more preferably, the nucleotide sequence is SEQ ID NO: 7293.

[1100] The siRNA disclosed in this application may be prepared with modified ribonucleotides as described herein. Further, the modified ribonucleotide of the siRNA used in the present method is incorporated into said siRNA by chemical synthesis or enzymatic synthesis.

[1101] The siRNA disclosed in this application may or may not have a 5′ triphosphate group.

[1102] The modified siRNA is administered to a patient by a method selected from the group consisting of intravenous injection, subcutaneous injection, oral delivery, and liposome delivery. The modified siRNA accumulates in an organ, tissue or body system of the patient that are the liver, gastrointestinal tract, respiratory tract, cervix or skin.

[1103] The present invention also provides a method of inhibiting the replication of a virus, such as SARS virus, in cells positive for SARS virus comprising transfecting SARS-positive cells with a vector that directs the expression of modified siRNA which is specific for SARS. The cells are evaluated to determine if a marker in the cells has been inhibited by the modified siRNA.

[1104] The term patient, as used herein, can be an animal, preferably a mammal. More preferably the subject can be a primate, including non-human and humans. The terms subject and patient can be used interchangeably.

[1105] The treatment envisioned by the current invention can be used for subjects with a pre-existing viral infection, or for subjects pre-disposed to a SARS virus infection. Additionally, the method of the current invention can be used to correct or compensate for cellular or physiological abnormalities involved in conferring susceptibility to viral infections in patients, and/or to alleviate symptoms of a viral infection in patients, or as a preventative measure in patients.

[1106] The method of treating a patient having a viral infection involves administration of compositions to the subjects. As used herein, composition can mean a pure compound, agent or substance or a mixture of two or more compounds, agents or substances. As used herein, the term agent, substance or compound is intended to mean a protein, nucleic acid, carbohydrate, lipid, polymer or a small molecule, such as a drug.

[1107] In one embodiment of the current invention, the composition administered to the subject is a pharmaceutical composition. Further, the pharmaceutical composition can be administered orally, nasally, parenterally, intrasystemically, intraperitoneally, topically (as by drops or transdermal patch), bucally, or as an oral or nasal spray. The term “parenteral,” as used herein, refers to modes of administration which include intravenous, intramuscular, intraperitoneal, intrasternal, subcutaneous and intraarticular injection and infusion. The pharmaceutical compositions as contemplated by the current invention may also include a pharmaceutically acceptable carrier.

[1108] By “pharmaceutically acceptable carrier” is intended, but not limited to, a non-toxic solid, semisolid or liquid filler, diluent, encapsulating material or formulation auxiliary of any type, such as liposomes.

[1109] A pharmaceutical composition of the present invention for parenteral injection can comprise pharmaceutically acceptable sterile aqueous or nonaqueous solutions, dispersions, suspensions or emulsions as well as sterile powders for reconstitution into sterile injectable solutions or dispersions just prior to use. Examples of suitable aqueous and nonaqueous carriers, diluents, solvents or vehicles include water, ethanol, polyols (such as glycerol, propylene glycol, polyethylene glycol, and the like), carboxymethylcellulose and suitable mixtures thereof, vegetable oils (such as olive oil), and injectable organic esters such as ethyl oleate. Proper fluidity can be maintained, for example, by the use of coating materials such as lecithin, by the maintenance of the required particle size in the case of dispersions, and by the use of surfactants.

[1110] The compositions of the present invention can also contain adjuvants such as, but not limited to, preservatives, wetting agents, emulsifying agents, and dispersing agents. Prevention of the action of microorganisms can be ensured by the inclusion of various antibacterial and antifungal agents, for example, paraben, chlorobutanol, phenol, sorbic acid, and the like. It can also be desirable to include isotonic agents such as sugars, sodium chloride, and the like. Prolonged absorption of the injectable pharmaceutical form can be brought about by the inclusion of agents which delay absorption such as aluminum monostearate and gelatin.

[1111] In some cases, to prolong the effect of the drugs, it is desirable to slow the absorption from subcutaneous or intramuscular injection. This can be accomplished by the use of a liquid suspension of crystalline or amorphous material with poor water solubility. The rate of absorption of the drug then depends upon its rate of dissolution which, in turn, can depend upon crystal size and crystalline form. Alternatively, delayed absorption of a parenterally administered drug form is accomplished by dissolving or suspending the drug in an oil vehicle.

[1112] Injectable depot forms are made by forming microencapsule matrices of the drug in biodegradable polymers such as polylactide-polyglycolide. Depending upon the ratio of drug to polymer and the nature of the particular polymer employed, the rate of drug release can be controlled. Examples of other biodegradable polymers include poly(orthoesters) and poly(anhydrides). Depot injectable formulations are also prepared by entrapping the drug in liposomes or microemulsions which are compatible with body tissues.

[1113] The injectable formulations can be sterilized, for example, by filtration through a bacterial-retaining filter, or by incorporating sterilizing agents in the form of sterile solid compositions which can be dissolved or dispersed in sterile water or other sterile injectable medium just prior to use.

[1114] Solid dosage forms for oral administration include, but are not limited to, capsules, tablets, pills, powders, and granules. In such solid dosage forms, the active compounds are mixed with at least one item pharmaceutically acceptable excipient or carrier such as sodium citrate or dicalcium phosphate and/or a) fillers or extenders such as starches, lactose, sucrose, glucose, mannitol, and silicic acid, b) binders such as, for example, carboxymethylcellulose, alginates, gelatin, polyvinylpyrrolidone, sucrose, and acacia, c) humectants such as glycerol, d) disintegrating agents such as agar-agar, calcium carbonate, potato or tapioca starch, alginic acid, certain silicates, and sodium carbonate, e) solution retarding agents such as paraffin, f) absorption accelerators such as quaternary ammonium compounds, g) wetting agents such as, for example, acetyl alcohol and glycerol monostearate, h) absorbents such as kaolin and bentonite clay, and i) lubricants such as talc, calcium stearate, magnesium stearate, solid polyethylene glycols, sodium lauryl -sulfate, and mixtures thereof. In the case of capsules, tablets and pills, the dosage form can also comprise buffering agents.

[1115] Solid compositions of a similar type can also be employed as fillers in soft and hard filled gelatin capsules using such excipients as lactose or milk sugar as well as high molecular weight polyethylene glycols and the like.

[1116] The solid dosage forms of tablets, dragees, capsules, pills, and granules can be prepared with coatings and shells such as enteric coatings and other coatings well known in the pharmaceutical formulating art. They can optionally contain opacifying agents and can also be of a composition that they release the active ingredient(s) only, or preferentially, in a certain part of the intestinal tract, optionally, in a delayed manner. Examples of embedding compositions which can be used include polymeric substances and waxes.

[1117] The active compounds can also be in micro-encapsulated form, if appropriate, with one or more of the above-mentioned excipients.

[1118] Liquid dosage forms for oral administration include, but are not limited to, pharmaceutically acceptable emulsions, solutions, suspensions, syrups and elixirs. In addition to the active compounds, the liquid dosage forms can contain inert diluents commonly used in the art such as, for example, water or other solvents, solubilizing agents and emulsifiers such as ethyl alcohol, isopropyl alcohol, ethyl carbonate, ethyl acetate, benzyl alcohol, benzyl benzoate, propylene glycol, 1,3-butylene glycol, dimethyl formamide, oils (in particular, cottonseed, groundnut, corn, germ, olive, castor, and sesame oils), glycerol, tetrahydrofurfuryl alcohol, polyethylene glycols and fatty acid esters of sorbitan, and mixtures thereof.

[1119] Besides inert diluents, the oral compositions can also include adjuvants such as wetting agents, emulsifying and suspending agents, sweetening, flavoring, and perfuming agents.

[1120] Suspensions, in addition to the active compounds, can contain suspending agents as, for example, ethoxylated isostearyl alcohols, polyoxyethylene sorbitol and sorbitan esters, microcrystalline cellulose, aluminum metahydroxide, bentonite, agar-agar, and tragacanth, and mixtures thereof.

[1121] Alternatively, the composition can be pressurized and contain a compressed gas, such as nitrogen or a liquefied gas propellant. The liquefied propellant medium and indeed the total composition is preferably such that the active ingredients do not dissolve therein to any substantial extent. The pressurized composition can also contain a surface active agent. The surface active agent can be a liquid or solid non-ionic surface active agent or can be a solid anionic surface active agent. It is preferred to use the solid anionic surface active agent in the form of a sodium salt.

[1122] The compositions of the present invention can also be administered in the form of liposomes. As is known in the art, liposomes are generally derived from phospholipids or other lipid substances. Liposomes are formed by mono- or multi-lamellar hydrated liquid crystals that are dispersed in an aqueous medium. Any non-toxic, physiologically acceptable and metabolizable lipid capable of forming liposomes can be used. The present compositions in liposome form can contain, in addition to the compounds of the invention, stabilizers, preservatives, excipients, and the like. The preferred lipids are the phospholipids and the phosphatidyl cholines (lecithins), both natural and synthetic. Methods to form liposomes are known in the art (see, for example, Prescott, Ed., Meth. Cell Biol. 14:33 et seq (1976)).

[1123] One of ordinary skill will appreciate that effective amounts of the agents of the invention can be determined empirically and can be employed in pure form or, where such forms exist, in pharmaceutically acceptable salt, ester or prodrug form. The agents can be administered to a subject, in need of treatment of viral infection, as pharmaceutical compositions in combination with one or more pharmaceutically acceptable excipients. It will be understood that, when administered to a human patient, the total daily usage of the agents or composition of the present invention will be decided by the attending physician within the scope of sound medical judgement. The specific therapeutically effective dose level for any particular patient will depend upon a variety of factors: the type and degree of the cellular or physiological response to be achieved; activity of the specific agent or composition employed; the specific agents or composition employed; the age, body weight, general health, sex and diet of the patient; the time of administration, route of administration, and rate of excretion of the agent; the duration of the treatment; drugs used in combination or coincidental with the specific agent; and like factors well known in the medical arts. For example, it is well within the skill of the art to start doses of the agents at levels lower than those required to achieve the desired therapeutic effect and to gradually increase the dosages until the desired effect is achieved.

[1124] Dosing can also be arranged in a patient specific manner to provide a predetermined concentration of the agents in the blood, as determined by techniques accepted and routine in the art. Thus patient dosaging can be adjusted to achieve regular on-going blood levels, as measured by HPLC, on the order of from 50 to 1000 ng/ml.

[1125] It will be readily apparent to one of ordinary skill in the relevant arts that other suitable modifications and adaptations to the methods and applications described herein can be made without departing from the scope of the invention or any embodiment thereof.

[1126] The modified siRNA is prepared by custom chemical synthesis by Dharmacon, at Lafayette Colo. Each C and U within the siRNA duplex (GL2), has been substituted with 2′-F-U and 2′-F-C except for the 3′-end overhang, which was dTdT.

[1127] To test the stability of 2′ chemically modified siRNA compared to unmodified siRNA (siRNA), the following experiment is performed. 4 ngs of siRNA are added to a 20 μL volume of 80% human serum from a healthy donor. This mixture is incubated at 37° C. for various times ranging from 1 minute up to 10 days. The same process is performed for 2′ fluorine modified siRNA (2′-F siRNA). When the incubation process is finished, the mixtures are placed on ice and then immediately separated by PAGE along with a ³²P-siRNA control. The 2′ modified siRNA is stable as compared to unmodified siRNA.

V. Identification of Therapeutically Active Agents for Treatment of SARS Virus Infection

[1128] The invention provides methods for treating SARS by administering therapeutically active agents, such as small molecule compounds, to a mammal, as well as methods of identifying therapeutically active agents, such as potent small molecules, for the treatment of SARS virus infection.

[1129] In one aspect of the invention a method of identifying a therapeutically active agent is provided comprising: (a) contacting the therapeutically active agent with a cell infected with the SARS virus; (b) measuring attenuation of a SARS related enzyme.

[1130] In a more particular embodiment, the therapeutically active agent is a small molecule. In another more particular embodiment, the therapeutically active agent is a nucleoside analog (e.g. Ribavirin). In another more particular embodiment the small molecule is a SMIP or peptidic immunomodulating compound. In another more particular embodiment the therapeutically active agent is a peptoid, oligopeptide, or polypeptide. In another embodiment the SARS related enzyme is SARS protease. In another embodiment the SARS related enzyme is SARS polymerase. In still another embodiment the SARS related enzyme is a kinase. In still another embodiment, the SARS related enzyme is a protease. The furin inhibitor peptidyl chloromethylketone prevents blocks cell-cell fusion after MHV infection (de Haan et al. (2004) J Virol), which offers guidance for SARS therapy.

[1131] The invention includes a cell-based assay that can be used to screen for and identify a therapeutically active agent for the treatment of SARS virus infection. Therapeutically active agents of the invention include agents that inhibit, prevent or reduce the replication of a SARS virus. Such agents can be identified by infecting a cultured cell (such as, for example, VERO cells) with a SARS virus and evaluating the impact of potential antiviral compounds on SARS virus replication. Assays to measure the effect of a potential antiviral compound on virus replication are known in the art and may be based on a variety of parameters.

[1132] The cell-based assay may be used in a high-throughput screen to identify therapeutically active compounds from chemical libraries comprising potential antiviral compounds. Therapeutically active compounds suitable for use in the invention may inhibit any SARS viral target that is essential for viral replication in whole cells. Efficacy (the ability of a compound to inhibit or inactivate the target, be it viral or cellular, that results in the reduction of virus in the culture) of the therapeutic agent is measured by assessing the viability and/or the proliferation of surviving cells in a SARS virus infected cell culture.

[1133] A number of methods can be used to measure cell viability are known in the art, such as assays measuring cellular enzymes, proteins, nucleotide triphoshates (e.g. ATP), nucleic acids (e.g. host cell mRNA (e.g. GAPDH) or rRNA sequences) or cellular metabolites such as MTT or MTS. In addition, fluorescent (including, for example HSV paper) or non-fluorescent dyes (e.g. propidium diiodide) or labeling of DNA can be used to measure indications of cell viability and/or proliferation.

[1134] Alternatively, efficacy of a compound or sample can be determined by directly measuring the amount of virus or viral products in the culture. Methods for measuring the amount of virus, viral genome or viral products include: PCR, RT-PCR, TMA, reporter proteins with fluourescent or luminescent qualities or enzymatic functions (e.g., luciferase, alkaline phosphatase, GFP) or proteins that can be detected by antibodies (e.g. EGF) that might be incorporated into the viral genome prior to infection of the cell culture. Further, viral products such as viral proteins can be measured by ELISA or enzymatic activities. Methods for identifying viral polynucleotides, viral proteins and antibodies specific to viral proteins are discussed above.

[1135] Potential antiviral compounds are applied to the cell-based assay at a concentration of approximately 10 μM and compound classes having therapeutic effect are identified by measuring the parameter of choice (such as cell viability/proliferation or the virus or viral genome or a viral product be it viral in origin or non-virus in orgin). Once compounds are identified as having activity, they are resynthesized, and analoged. Starting with the identified compound, many analogs and new compounds are synthesized during consecutive optimization cycles of synthesis, biological profiling and modeling techniques to optimize the to the lead structure until in vivo activity is elucidated and optimized.

[1136] Cells suitable for use in the assay include the cells described above as suitable for vaccine production. Preferably, the cells are African green monkey kidney cells (Vero) cells. Human embyronic lung fibroblasts or normal human diploid fibroblasts may also be used in the invention.

[1137] In one embodiment, the invention includes a fluorescence based cytopathogenicity assay to measure the effect of a potential antiviral compound on a cell-based assay. One example of a fluorescence based cytopathogenicity assay is illustrated below.

[1138] 1×10⁴ Vero cells per well of a microtiter plate (MTP) are infected with a defined amount of SARS virus selected within the following ranges for optimal MOI: 5-10, 10-25, 25-50, 50-100, 100-500, or 500-1000 PFU in a total volume of 200 μl media (M199 medium supplemented with 5% FCS, 2 mM glutamine, 100 IU/ml penicillin and 100 μg/ml streptomycin) in the presence or absence of the potential antiviral compound and incubated for at least 1, 2, 3, 4, 5, 6, or 7 days at 37° C., 5% CO₂. The wells of the MTP are washed with PBS (200 μl) and then filled with 200 μl PBS containing 10 μg/ml fluorescein diacetate. After a 45-min incubation at room temperature, fluorescence is measured at 485 nm excitation and 538 nm emission wavelengths. IC₅₀ values are determined by a nonlinear plot of antiviral activity as a function of drug concentration.

[1139] Other cell based assays are known in the art and include, among others, methods of GFP detection and Luc detection. In addition, a Promega kit is commercially available that provides additional methods of measuring cell viability, etc.

[1140] In one embodiment, the invention includes a method of measuring the efficacy of a potential antiviral compound using RT-PCR to detect the levels of SARS viral RNA in the cell based assay. Methods of using RT-PCR are known in the art. One example of such an assay is described below.

[1141] 5×10⁶ Vero cells are seeded in tissue culture. Flasks containing the cells are incubated over night at 37° C., 5% CO₂. The cells are infected (m.o.i.=1) with SARS virus in the presence and absence of potential antiviral compounds. Optionally, the cells may be pretreated with the potential compound prior to infection. In either case, a suitable control cell assay is also prepared.

[1142] The RNA of infected cells is purified at 2 h (UL54), 12 h (UL8) and 16 h (UL13) after infection, (Qiagen) RNA purification (RNeasy kit; 40 μl elution) and quantified (absorption at 260 nm). The RNA (2 μg) is reverse transcribed with a specific primer (2 pmol, using one of the primer pairs described herein) into cDNA according to the Superscript II protocol (Invitrogen). Aliquots (2 μl) of the reverse transcription reaction are amplified by PCR. Fragments of the appropriate target SARS gene, i.e., a gene encoding a SARS enzyme, are amplified in 30 cycles (UL54 and UL8: 3 min, 94° C. hot start; 1 min, 94° C. denaturation; 1 min, 55° C. annealing; 1 min, 72° C. polymerization. UL13: 3 min, 94° C. hot start; 1 min, 94° C. denaturation; 1 min, 60° C. annealing; 1 min, 72° C. polymerization) by PCR (Taq-Polymerase, Stratagene), in a 100-μl reaction volume with the appropriate oligonucleotides, as described herein at 0.1 nmol each. 8-μl aliquots of cycle 20-30 (lanes 2-12) of the PCR were resolved on a 2% agarose gel (Invitrogen) according to the manufacturer's instructions.

[1143] Cell-based assays of the invention may optionally use a variant or derivative of a wild-type SARS virus that has reduced or attenuated virulence in humans and/or animal models (e.g., mouse, non-human primate, etc.) Use of such attenuated SARS viruses in screening methods may reduce safety concerns and precautions that would otherwise be associated with the pathogenic nature of the SARS virus and may eliminate or reduce the need for the implementation of cumbersome high containment levels during performance of the assays and screening of compounds.

[1144] The invention includes an enzyme-based assay that can be used to screen for and identify a therapeutically active agent for the treatment of SARS virus infection.

[1145] An embodiment of the invention is an assay comprising contacting a known quantity of SARS protease in solution to a peptide containing a detectable marker and cleavage site for SARS protease, wherein SARS protease activity is monitored by measuring the intensity of the marker on the cleaved product.

[1146] In a more particular embodiment, a method of assaying for SARS protease is provided comprising contacting a sample solution containing SARS protease with a peptide containing a fluorescent donor, fluorescent quencher, and cleavage site for SARS protease, said peptide being detectable with a fluorometer when cleaved, wherein SARS protease activity is determined in the sample by the amount of fluorescence detected by the fluorometer.

[1147] Assays based on the direct measurement of SARS protease inhibition may be utilized for screening for SARS therapeutics. Protease for such assays such as 3C-like protease and papain-like protease may be isolated and purified for such assays as described in Seybert, et al., J. Gen. Virol., 78:71-75, 1997, Ziebuhr, et al., Adv. Exp. Med. Biol., 440:115-120, 1998, Sims, et al., Adv. Exp. Med. Biol. 440:129-134, 1998, Ziebuhr, et al., J. Virol., 73:177-185, 1999, Teng, et al., J. Virol., 73:2658-2666, 1999, Herold, et al., J. Biol. Chem. 274:14918-14925, 1999, and Ziebuhr, et al., J. Biol. Chem. 276:33220-33232, 2001. Furthermore, Example 30 describes a novel method of purifying SARS protease using column chromatography. Example 31 describes a continuous fluorescence resonance energy transfer (FRET) assay for measuring SARS protease activity. Protease enzyme based assays such as the FRET assay demonstrated in Example 31 are readily adapted for high-throughput screening and are used for screening candidate antiviral compounds. Performance of the protease enzymatic assay in the presence of a SARS protease inhibitor compound will show a decreased amount of fluorescence at a given time when compared to negative control assay containing no test compound on a non-inhibiting control compound. Such a method would involve the steps of: (a) providing an assay solution comprising SARS protease; (b) adding a test compound to the assay solution; (c) adding a substrate for SARS protease to the assay solution; and (d) measuring the proteolytic activity in the assay solution. In a preferred embodiment, the proteolytic activity is measured by the fluorescence of fluorophore product produced by the enzymatic activity of SARS protease.

[1148] Attenuated SARS virus variants generally contain one or more genome modifications or mutations (e.g., substitutions, deletions, insertions) in protein encoding or non-coding regions. Specific examples of attenuating mutations include, for example, genetic modifications in the 5′-end noncoding region, leader sequence, intergenic regions, 3′-end noncoding region, ORF 1a, ORF 1b, S gene, E gene, M gene, N gene, or any of the nonstructural protein genes outside of the ORF 1a/1b region. Preferred attenuating mutations are in a SARS virus structural protein (e.g., Spike (S)), a protease or polymerase domain, or a non-coding sequence (e.g., 5′-end noncoding region, intergenic sequence). In addition, a cleavage site may be introduced or eliminated within the spike protein (see for example, Gombold et al., J. Virol. 67:4504-4512, 1993; Bos et al., Virology 214:453-463, 1995), such modification that may also be useful for optimization of expression of recombinant spike protein antigen (e.g., for vaccine purposes).

[1149] A variety of methods are used according to the present invention in order to obtain attenuated variants of SARS virus. Such methods include serial passage of the SARS virus in cultured cells (e.g., mammalian cell culture, such as fetal rhesus kidney cells or VERO cells), until the SARS virus demonstrates attenuated function. The serial propagation of virus may be performed at any temperature at which tissue culture passage attenuation occurs, and may be performed in conjunction with one or more steps of mutagenesis (e.g., chemical mutagenesis). The attenuated phenotype of SARS virus variants, obtained after one or more cell culture passages, is readily measured by one skilled in the art. As used herein, attenuation refers to the decreased virulence of the SARS virus in a human subject. Evidence of attenuated function may be indicated by decreased levels of viral replication or by decreased virulence in an animal model.

[1150] Other methods of producing an attenuated SARS virus include cell culture passage of the virus at sub-optimal temperatures (cold passage), as well as introduction of attenuating mutations into the SARS viral genome by random mutagenesis (e.g., chemical mutagenesis, such as using 5-fluorouracil) or using directed mutagenesis. Preparation and generation of attenuated RSV vaccines (the methods of which will generally applicable to SARS virus) are disclosed in, for example, EP 0640128, U.S. Pat. No. 6,284,254, U.S. Pat. No. 5,922,326, U.S. Pat. No. 5,882,651.

[1151] The number of passages required to obtain safe, immunizing attenuated virus is dependent at least in part on the conditions employed. Periodic testing of the SARS virus culture for virulence and immunizing ability in animals (e.g., mouse, primate) can readily determine the parameters for a particular combination of tissue culture and temperature.

[1152] In another embodiment, the cell-based assay for screening of antiviral compounds is based on the readout of expression of a gene product (e.g., reporter gene product) that is not from SARS virus. Gene products particularly suitable to the present invention include, but are not limited to those of the above-described assays.

[1153] In order to achieve such a read-out, the gene-of-interest (GOI) encoding said gene reporter gene product must be incorporated into a replicating SARS virus genome or construct derived from a SARS virus genome (e.g., SARS virus replicon, SARS virus defective-interfering (DI) RNA). FIG. 13 is a schematic depicting locations for incorporation of the reporter gene into a SARS virus genome. Preferably, insertion of a heterologous reporter gene-of-interest is at a site between existing SARS virus genes, such as for example, as shown in FIG. 13. For example, the GOI may be inserted closely following the termination codon of a SARS virus gene (e.g., ORF 1b, S, E, M, N). Insertion should be positioned in order to minimize disruption of mRNA transcription for the SARS virus gene(s). The GOI may also be inserted as an in-frame “fusion” with an existing SARS virus gene, such that sufficient function of the GOI is maintained for detection. To optimize expression, an additional SARS virus intergenic sequence (e.g., SEQ ID NO: 7388, with or without additional flanking SARS virus sequences) may also be engineered into a position preceding the inserted GOI.

[1154] Incorporation of a GOI into SARS virus may be accomplished by one of skill in the art using a variety of techniques. For example, one preferred method is targeted RNA recombination, that takes advantage of the ability of coronavirus RNAs to undergo recombination within the cell (see for example Fischer et al., J. Virol. 71:5148-5160, 1997; Koljesar et al., J. Vet. Sci. 2:149-157, 2001). A construct of desired configuration (e.g., cDNA of defective interfering RNA of SARS virus) containing the GOI flanked by SARS virus sequence (e.g., intergenic sequence) is generated such that RNA may be transcribed directly within a eukaryotic cell or in vitro and transfected into susceptible cells also infected with SARS virus. Recombinant virus containing the GOI is identified based on expression of the GOI encoded marker.

[1155] Alternatively, incorporation of a GOI into SARS virus may be accomplished by one of skill in the art by first assembling a full-length cDNA clone of the SARS virus, that can be used to produce infectious RNA transcripts in vivo (e.g., from an RNA polymerase II promoter) or in vitro (e.g., from a bacteriophage promoter). Although relatively long in genome length, such assembly of a full-length cDNA clone is now readily obtainable by one of skill in the art using standard molecular biology and reverse genetics techniques and the genome sequence of SARS virus (see for example, Thiel et al., J. Gen. Virol., 82:1273-1281, 2001; Almazan et al., Proc. Natl. Acad. Sci. USA 97:5516-5521, 2000; Thiel et al. (2003) J Gen Virol 82:1273-1281; Yount et al (2003) PNAS USA 100:12995-13000). Insertion of a heterologous GOI into a full-length SARS virus genome cDNA may be performed using a variety of techniques, such as for example, ligation into natural or synthetic restriction sites, PCR (e.g., overlapping PCR), and recombination.

[1156] It may also be desirable to utilize similar SARS virus recombinants containing a gene-of-interest for antiviral screening, however, with further modification-to minimize or eliminate virus-induced cytopathology (e.g., CPE). Non-cytopathic derivatives from SARS virus may be obtained by one of skill in the art using a variety of methods. For example, a selectable marker (e.g., drug resistance marker) may be incorporated as GOI into a SARS virus genome to produce infectious virus as described above (see for example, Perri et al., J. Virol., 74:9802-9807, 2000). Infectious GOI-containing SARS virus or infectious genome RNA/cDNA is then used to infect/transfect cells (e.g., VERO), with or without prior mutagenesis, after which time the infected cells are subjected to the appropriate selection. Only those cells containing SARS virus harboring both the selectable marker and one or more mutations rendering the virus non-cytopathic will survive the selection process and grow out. Active SARS virus replication in these cells is readily detected using a variety of detection techniques (e.g., PCR, Northern blot) and such cells may serve as the substrate for cell-based screening assays. Mutations that result in the desired noncytopathic SARS virus phenotype may include nucleotide substitutions, deletions or additions, and may occur in a variety of genome coding or non-coding regions (e.g., 5′ or 3′-end noncoding regions, intergenic regions, ORF1a, ORF1b, a protease domain, a polymerase domain). The identification of such mutations is readily accomplished by exchange of sequences with wild-type (e.g., parental) SARS virus and demonstrating transfer of the phenotype, and sequencing of the appropriate genome region. Similar mutations that reduce or eliminate cytopathogenicity also may be utilized in the context of a SARS virus derived replicon vector, either by similar selection directly using a SARS virus replicon or by specific engineering of the replicon based on mutation(s) identified in the context of infectious SARS virus as described above. In addition, such mutations may serve as the basis for attenuated SARS virus derivatives, as described elsewhere in this document.

[1157] Alternatively, rather than using infectious SARS virus or its derivatives for cell-based screening assays, propagation defective “replicons” may be engineered and utilized. Such replicons maintain all protein encoding sequences and cis replication sequences required for RNA replication and expression within a cell, but are deleted of one or more sequences or genes required for packaging of progeny SARS virus (see for example Curtis et al., J. Virol., 76:1422-1434, 2002). FIG. 14 is a schematic depicting representative examples of SARS virus replicons according to the present invention. For example a SARS virus cDNA construct is generated, that is lacking one or more (or all) structural protein encoding genes, whereby the missing SARS virus gene(s) is/are replaced by the GOI, maintaining all necessary transcription signals for expression of the GOI. Operably linked with the SARS virus replicon cDNA construct is a promoter for RNA polymerase that can be used to transcribe the replicon RNA in vivo (e.g., RNA polymerase II promoter) or in vitro (e.g., bacteriophage promoter). The SARS replicon may be introduced into a susceptible cell by transfection as RNA or DNA, depending on the promoter of choice, and the transfected cells may be utilized for the evaluation of antiviral compounds. By incorporating one or more mutations rendering the replicon noncytopathic for the cells (see above), one can avoid the need for nucleic acid transfection each time an assay is to be performed.

[1158] Alternatively, SARS virus replicons may be packaged into virus like particles that allow infection of cells, rather than requiring transfection of nucleic acid molecules. A requirement for replicon packaging is that essential SARS virus gene functions deleted from the replicon (e.g., one or more structural proteins) are provided in trans within the cell containing the replicon. A variety of methods for packaging of replicon RNA can be utilized to one of skill in the art (see for example, Curtis et al., ibid: Ortego, et al., J. Virol., 76:11518-11529, 2002). For example, stably transformed cell lines constitutively or inducibly expressing the required SARS virus gene functions may be utilized. Alternatively, the required SARS virus gene functions may be expressed by viral vectors that are introduced into the replicon-containing cell. Alternatively a defective interfering (DI) SARS virus derived RNA containing the required gene functions may be introduced into the replicon-containing cell. Such DI constructs used to complement missing replicon functions may be more commonly referred to as defective helper RNA or defective helpers.

[1159] Another configuration useful for cell-based antiviral screening assays according to the present invention utilizes SARS virus derived DI RNAs encoding a GOI (see for example Stirrups, et al., J. Gen. Virol., 81:1687-1698, 2000; Liao, et al., Virology 208:319-327, 1995). Introduction of a SARS DI, either as cDNA linked to an RNA polymerase II promoter or as in vitro transcribed RNA, into susceptible cells also infected with SARS virus, allows for a readout of the GOI reporter product in assays.

[1160] A replicon-based system for rapid identification of coronavirus replicase inhibitors is described by Hertzig et al. (2004) J Gen Virol DOI 10.1099/vir/0/80044-0. Briefly, the system uses a non-cytopathic selectable replicon RNA that can be stably maintained in eukaryotic cells. The replicon RNA mediates reporter gene expression as a marker for coronavirus replication, and expression of the reporter can be used to test the inhibitory effect of test compounds in vitro, thereby allowing high throughput screening for replicase inhibitors without the need to grow infectious virus. Preferred replicon RNAs include a neomycin resistance gene in the replicase gene with a downstream reporter gene (e.g. GFP) that is expressed via replicase-mediated synthesis of a sub-genomic mRNA.

VI. Compositions and Methods for Treatment of SARS Virus Infection

[1161] The present invention relates to compositions and methods for the treatment and/or prevention of SARS. The invention further includes a method for the treatment and/or prevention of SARS through the administration of a therapeutically effective amount of at least one antiviral compound from among those described in the US patents and published international patent applications listed in Table 1 and Table 2. In one embodiment of the method, the antiviral compound is a small molecule. In another embodiment, the antiviral compound is a protease inhibitor. In a further embodiment, the antiviral protease inhibitor is a 3C-like protease inhibitor and/or a papain-like protease inhibitor. Combined treatment with the lopinavir/ritonavir (Kaletra) protease inhibitor and ribavirin has shown a favorable clinical response (Chu et al. (2004) Thorax 59:252-256). In another embodiment, the antiviral compound is an inhibitor of an RNA dependent RNA polymerase. In another embodiment, a first antiviral compound that is a protease inhibitor is administered with a second antiviral compound that is an RNA-dependent RNA polymerase inhibitor. The invention further provides for the administration of a steroidal anti-inflammatory drug in combination with at least one antiviral compound, for example, from the antiviral compounds described in the documents listed in Table 1 and Table 2. A combination treatment of steroids and ribavirin has been described by Fujii et al. (2004) J Infect Chemother 10:1-7. A combination treatment of corticosteroids and interferon alfacon-1 has also been reported (Loutfy et al. (2003) JAMA 290:3222-3228).

[1162] The invention further provides for a method for the treatment and/or prevention of SARS through the administration of a therapeutically effective amount of at least one antiviral compound from among those described in the US Patents and published international patent applications listed in Table 1 and Table 2 by inhalation. In another aspect, the antiviral compound may be administered in combination with a SMIP, SMIS, or other immunomodulatory compound such as those in Table 34 and in Table 35. In one embodiment of the method, the antiviral compound is a small molecule. In another embodiment, the antiviral compound is a protease inhibitor. In a further embodiment, the antiviral protease inhibitor is a 3C-like protease inhibitor and/or a papain-like protease inhibitor. In another embodiment, the antiviral compound is an inhibitor of an RNA dependent RNA polymerase. In another embodiment, a first antiviral compound that is a protease inhibitor is administered with a second antiviral compound that is an RNA-dependent RNA polymerase inhibitor. The invention further provides for the administration of a steroidal anti-inflammatory drug in combination with at least one antiviral compound, for example, from the antiviral compounds described in the documents listed in Table 1 and Table 2. The steroidal anti-inflammatory drug may be administered by inhalation for a local effect or administered for systemic absorption such as via an oral or intravenous route.

[1163] The invention further provides for methods for treating SARS infection comprising administering a small molecule immunopotentiator (SMIP) compound either alone or in combination with an antiviral compound or in combination with a SARS vaccine. In a further embodiment, the SMIP is a compound disclosed herein or set forth in Table 34.

[1164] The invention further provides for methods for treating SARS infection comprising administering an immunosuppressant compound, optionally a small molecule suppressant (SMIS) compound either alone or in combination with an antiviral compound. In a further embodiment, the immunosuppressant compound is disclosed herein or set forth in Table 35.

[1165] The invention further provides peptidic immunomodulating compositions, that include oligo and polypeptides, capable of effecting inflammatory response in a patient. In one embodiment, the peptidic immunomodulating composition is able to stimulate human cells to produce cytokines. In another embodiment the peptidic immunomodulating composition is capable of decreasing cytokine levels in the human. Preferred Examples of peptidic immunomodulating compositions include those listed in Table 35, as well as TGFβ2, TGFβ1, TGFβ3, thymopentin (TP5), β-mercaptopropionyl-arginyl-lysyl-aspartyl-valyl-tyrosyl-cysteine amide, colostrinine, lactoferrin (LF), cyclolinopeptide A (CLA), and tuftsin (TKPR). The peptidic immunomodulating compositions of the invention may be used alone or in combination with other agents, preferably antiviral compounds, for the treatment of SARS.

[1166] The invention further provides for a kit for use by a consumer for the treatment and/or prevention of SARS. Such a kit comprises: a) a pharmaceutical composition comprising a therapeutically effective amount of at least one antiviral, SMIP, SMIS, or other immunomodulating compound from among those described in the US patents and published international patent applications listed in Table 1, Table 2, Table 34 and Table 35 and a pharmaceutically acceptable carrier, vehicle or diluent; b) a container for holding the pharmaceutical composition; and, optionally, c) instructions describing a method of using the pharmaceutical compositions for the treatment and or the prevention of SARS. The kit may optionally contain a plurality of compounds for the treatment of SARS wherein the antiviral compounds are selected from 3C-like protease inhibitors and papain-like protease inhibitors. In a further embodiment, the kit contains an antiviral compound that is an RNA-dependent RNA polymerase inhibitor. When the kit comprises more than one antiviral, SMIP, SMIS, or other immunomodulating compound, the compounds contained in the kit may be optionally combined in the same pharmaceutical composition.

[1167] An additional aspect of the invention provides for the use of at least-one of the antiviral, SMIP, SMIS, or other immunomodulating compounds described in the US Patents and published international patent applications listed in Table 1, Table 2, Table 34 and Table 35 for the manufacture of a medicament for the treatment or prevention of SARS.

[1168] An additional aspect of the invention provides for the use of at least one SMIP compound, or at least one immunosuppressant compound, or at least one SMIS compound for the manufacture of a medicament for the treatment or prevention of SARS. Preferred SMIP, immunosuppressant, and SMIS compounds are described herein.

[1169] Unless otherwise specified, the following terms, when used within Section VI: “Compositions and Methods for Treatment of SARS Virus Infection” of the present application have the meanings as defined below:

[1170] As used herein, “limit”, “treat” and “treatment” are interchangeable terms as are “limiting” and “treating” and, as used herein, include preventative (e.g., prophylactic) and palliative treatment or the act of providing preventative or palliative treatment. The terms include a postponement of development of SARS symptoms and/or a reduction in the severity of such symptoms that will or are expected to develop following infection with a SARS virus. The terms further include ameliorating existing SARS symptoms, preventing additional symptoms, ameliorating or preventing the underlying metabolic causes of symptoms.

[1171] Representative uses of the compositions and methods of the present invention include: the elimination or reduction of the viral load of the SARS virus in a vertebrate, including humans, the elimination or reduction of symptoms associated with SARS, and a reduction in morbidity associated with SARS. In a SARS patient population, the use of the compositions and methods of the invention will result in the reduction in the high mortality rates associated with SARS.

[1172] Infection with the SARS virus and the symptoms associated with SARS can be treated in a subject by administering the compositions of the invention. The compositions of the invention may be administered systemically. For systemic use, the compounds herein are formulated for parenteral (e.g., intravenous, subcutaneous, intramuscular, intraperitoneal, intranasal or transdermal) or enteral (e.g., oral or rectal) delivery according to conventional methods. Intravenous administration can be by a series of injections or by continuous infusion over an extended period. Administration by injection or other routes of discretely spaced administration can be performed at intervals ranging from weekly to once to three times daily or more. Alternatively, the compositions disclosed herein may be administered in a cyclical manner (administration of disclosed composition, followed by no administration, followed by administration of disclosed compositions, and the like). Treatment will continue until the desired outcome is achieved.

[1173] A “subject” is a vertebrate animal including a human that is in need of treatment with the compositions, methods and kits of the present invention. The term “subject” or “subjects” is intended to refer to both the male and female gender unless one gender is specifically indicated.

[1174] “Coadministration” of a combination of a plurality of antiviral compounds means that these components can be administered together as a composition or as part of the same, unitary dosage form. “Co-administration” also includes administering a plurality of antiviral compounds separately but as part of the same therapeutic treatment program or regimen. “Co-administration” also includes administering a plurality of other agents, such as, for example an oligopeptide, a polypeptide, a peptidic immunomodulator, nucleic acid, antibodies, or a vaccine wherein the compounds or agents are administered separately but as part of the same therapeutic treatment program or regimen. The components need not necessarily be administered at essentially the same time, although they can if so desired. “Co-administration” also includes separate administration at different times and in any order. For example, where appropriate a patient may take one or more component(s) of the treatment in the morning and the one or more of the other component(s) at night.

[1175] By “antiviral compound” as used herein is meant an antiviral compound as described in the US patents and published international patent applications listed in Table 1 and Table 2. The US patents and published international patent applications listed in Table 1, Table 2 and Table 35 are incorporated herein in their entirety. In one embodiment, the antiviral compound is an RNA-dependent RNA polymerase. In another preferred embodiment the antiviral compound is a 3C-like protease inhibitor or a papain-like protease inhibitor. The antiviral compounds may be administered in the form of the acid, or of a soluble alkali metal salt or alkaline earth metal salt where appropriate.

[1176] The precise dosage of the antiviral compound will vary with the dosing schedule, the oral potency of the particular antiviral compound chosen, the age, size, sex and condition of the subject, the severity of the disorder to be treated, and other relevant medical and physical factors. Thus, a precise pharmaceutically effective amount cannot be specified in advance and can be readily determined by the caregiver or clinician.

[1177] Generally, an appropriate amount of antiviral compound is chosen to obtain a reduction in the load of the SARS virus in the subject and/or to obtain a reduction in the symptoms associated with SARS. For humans, an effective oral dose of antiviral compound is typically from about 1.5 to about 6000 μg/kg body weight per day and preferably about 10 to about 2000 μg/kg of body weight per day.

[1178] One of ordinary skill in the art will recognize that certain antiviral, SMIP, SMIS, and immunomodulating compounds of the invention including 3C-like protease inhibitors, papain-like protease inhibitators, and RNA-dependent RNA polymerase inhibitors will contain one or more atoms that may be in a particular stereochemical, tautomeric, or geometric configuration, giving rise to stereoisomers, tautomers and configurational isomers. All such isomers and mixtures thereof are included in this invention, when active. Crystalline and amorphous forms of the antiviral compounds of this invention are also included as are hydrates, solvates, polymorphs, and isomorphs of the antiviral compounds of the invention.

[1179] SMIP compounds of the invention include compounds are described in issued U.S. Pat. Nos. 4,547,511 and 4,738,971 with the general structure (a): [chemical structure]
for the treatment of disorders responsive to agents that enhance cell-mediated immunity.

[1180] Immunostimulatory oligonucleotides and polynucleotides are described in PCT WO 98/55495 and PCT WO 98/16247. U.S. Patent Application No. 2002/0164341 describes adjuvants including an unmethylated CpG dinucleotide (CpG ODN) and a non-nucleic acid adjuvant. U.S. Patent Application No. 2002/0197269 describes compositions comprising an antigen, an antigenic CpG-ODN and a polycationic polymer.

[1181] Additionally, issued U.S. Pat. Nos. 4,689,338, 5,389,640, 5,268,376, 4,929,624, 5,266,575, 5,352,784, 5,494,916, 5,482,936, 5,346,905, 5,395,937, 5,238,944, 5,525,612, WO99/29693 and U.S. Ser. No. 09/361,544 disclose compounds of the general structure (b): [chemical structure]
for the use as “immune response modifiers.”

[1182] Further compounds with SMIP and antiviral activity are described below and in US patent application entitled Thiosemicarbazones as Anti-Virals and Immunopotentiators filed on Dec. 29, 2003 with an attorney docket number of PP19814.004US generally disclosing compounds of the following structures:

[1183] A compound of formula c:

[chemical structure]

[1184] wherein: E is absent or selected from the group consisting of alkyl, substituted alkyl, cycloalkyl, substituted cycloalkyl, aryl, substituted aryl, heterocyclyl, substituted heterocyclyl, heteroaryl, and substituted heteroaryl;

[1185] L is absent or is selected from the group consisting of oxo, amino, alkylene, substituted alkylene, alkoxy, alkylamino, aminoalkyl, heterocyclyl, carbocyclyl, and carbonyl;

[1186] W is absent or selected from the group consisting of cycloalkyl, substituted cycloalkyl, aryl, substituted aryl, heterocyclyl, substituted heterocyclyl, heteroaryl, and substituted heteroaryl;

[1187] X is absent or is selected from the group consisting of oxo, amino, alkylene, substituted alkylene, alkoxy, alkylamino, aminoalkyl, heterocyclyl, carbocyclyl, and carbonyl;

[1188] Y is selected from the group consisting of cycloalkyl, substituted cycloalkyl, aryl, substituted aryl, heterocyclyl, substituted heterocyclyl, heteroaryl, and substituted heteroaryl;

[1189] Y′ is absent or is selected from the group consisting of F, Cl, Br, I, nitro, alkyl, substituted alkyl, and optionally substituted heterocyclyl, amino, alkylamino, dialkylamino;

Y″ is absent or is selected from the group consisting of F, Cl, Br, I, nitro, alkyl, substituted alkyl, and optionally substituted heterocyclyl, amino, alkylamino, dialkylamino;

R′ is H, alkyl, or substituted alkyl;

R″ is H, or

R′ and R″ are taken together to form a hetercyclic ring;

[1190] Z and Z′ are independently selected from the group consisting of hydrogen, alkyl, substituted alkyl, aryl, substituted aryl, arylalkyl, substituted arylalkyl, heteroaryl, substituted heteroaryl, heteroarylalkyl, substituted heteroarylalkyl, alkoxy, substituted alkoxy, aminocarbonyl, alkoxycarbonyl, carboxyl sulfonyl, methanesulfonyl, and substituted or unsubstituted alkylcarbonyl, arylcarbonyl, aralkylcarbonyl, heteroarylcarbonyl, heteroaralkylcarbonyl, alkylcarbonyloxy, arylcarbonyloxy, aralkylcarbonyloxy, heteroarylcarbonyloxy, heteroaralkylcarbonyloxy, alkylaminocarbonyloxy, arylaminocarbonyloxy, formyl, loweralkylcarbonyl, loweralkoxycarbonyl, aminocarbonyl, aminoaryl, alkylsulfonyl, sulfonamido, aminoalkoxy, alkylamino, heteroarylamino, alkylcarbonylamino, alkylaminocarbonylamino, arylaminocarbonylamino, aralkylcarbonylamino, heteroarylcarbonylamino, arylcarbonylamino, cycloamidino, cycloalkyl, cycloimido, arylsulfonyl and arylsulfonamido; or

[1191] Z and Z′ are taken together to form a heterocyclic group, that may be optionally substituted and the tautomers and the pharmaceutically acceptable salts, esters, or prodrugs thereof.

[1192] Further SMIP compounds are described below and in U.S. patent application Ser. No. 10/762,873, Use of Tryptanthrin Compounds for Immune Potentiation, filed on Jan. 21, 2004 and disclosing the general embodiment of compounds represented by Formula (d): [chemical structure]
wherein

[1193] A, B, C, D, E, F, G, and H are independently selected from carbon and nitrogen, or A and B and/or C and D can be taken together to be nitrogen or sulfur;

[1194] R₁, R₂, R₃, R₄, R₈, and R₁₀ are independently selected from the group consisting of hydrogen, halogen, loweralkyl, alkyl, substituted alkyl, cycloalkyl, heterocyclyl, alkylheterocyclyl, substituted heterocyclyl, substituted alkenyl, amino, (substituted alkyl)(alkyl)amino, imino, haloloweralkyl, hydroxy, alkoxy, substituted alkoxy, hydroxyalkylthio, nitro, alkylsulfonyl, N-alkylsulfonamide, arylalkyl, arylalkylaryl, arylaryl, aryloxy, arylamino, acylamino, acyloxyamino, alkylaminoacylamino, alkylaminosulfonylamino, alkylamino, alkenylamino, dialkylamino, alkoxyalkylamino, alkoxyalkylheterocyclyl, mercaptoalkoxyalkyl, cyano, formyl, —COOR₁₁ wherein R₁₁ is hydrogen, loweralkyl, aryl, heterocyclyl, monosaccharide or disaccharide, and —CONR₁₂R₁₃ wherein R₁₂ and R₁₃ are independently selected from hydrogen, loweralkyl, aryl, heterocyclyl, saccharide, peptide and amino acid residues; or R₂ and R₃ taken together form a six membered aromatic ring;

[1195] R₇ and R₉ are independently selected from hydrogen, halogen, loweralkyl, haloloweralkyl, cycloalkyl, heterocyclyl, substituted heterocyclyl or heterocyclylalkyl; and

[1196] R₁, R₂, R₃, R₄, R₇, R₈, R₉, and R₁₀ are absent when the ring atom to which they would otherwise be bonded is sulfur or double-bonded nitrogen; or

[1197] the a pharmaceutically acceptable salts, esters, or prodrugs thereof, provided that R₁, R₂, R₃, R₄, R₇, R₈, R₉, and R₁₀ are not all hydrogen when A, B, C, D, E, F, and H are carbon.

[1198] In one embodiment, the compounds of Formula (I) have a backbone structure wherein D is nitrogen, and A-C and E-H are carbon.

[1199] In one embodiment, when D is carbon, at least one, or at least two of R₁—R₄, and R₇—R₁₀ are not hydrogen.

[1200] In one embodiment, R₁ through R₄, and R₈ and R₁₀ are independently selected from at least two of the group consisting of hydrogen, halogen, loweralkyl, cycloalkyl, heterocyclyl, substituted heterocyclyl, alkylheterocyclyl, amino, imino, haloloweralkyl, alkoxy, nitro, alkylsulfonyl, arylalkyl, arylalkylaryl, arylaryl, aryloxy, arylamino, acylamino, acyloxyamino, alkylaminoacylamino, alkylaminosulfonylamino, alkylamino, alkenylamino, dialkylamino, alkoxyalkylamino, alkoxyalkylheterocyclyl, mercaptoalkoxyalkyl, cyano, formyl, —COOR₁₁ where R₁₁ is hydrogen, loweralkyl, aryl, heterocyclyl, monosaccharide or disaccharide, and —CONR₁₂R₁₃ where R₁₂ and R₁₃ are independently selected from hydrogen, loweralkyl, aryl, heterocyclyl, saccharide, peptide and amino acid residues; and R₄ is not present when D is nitrogen.

[1201] In an additional embodiment, 4A, B, C, D, E, F, G, and H are independently selected from carbon and nitrogen;

[1202] R₁, R₂, R₃, R₄, R₈ and R₁₀ are independently selected from the group consisting of hydrogen, halogen, loweralkyl, alkyl, substituted alkyl, heterocyclyl, substituted heterocyclyl, substituted alkenyl, (substituted alkyl)(alkyl)amino, haloloweralkyl, hydroxy, alkoxy, substituted alkoxy, hydroxyalkylthio, nitro, N-alkylsulfonamide, cyano, —COOR₁₁ wherein R₁₁ is hydrogen, loweralkyl, aryl, heterocyclyl, monosaccharide or disaccharide, and —CONR₁₂R₁₃ wherein R₁₂ and R₁₃ are independently selected from hydrogen, loweralkyl, aryl, heterocyclyl, saccharide, peptide and amino acid residues.

[1203] For the compounds described herein:

[1204] The term “loweralkyl” refers to branched or straight chain acyclical alkyl groups comprising one to ten carbon atoms, including, e.g., methyl, ethyl, propyl, isopropyl, n-butyl, t-butyl, neopentyl and the like.

[1205] The term “alkyl” refers to alkyl groups that do not contain heteroatoms. Thus the term includes straight chain alkyl groups such as methyl, ethyl, propyl, butyl, pentyl, hexyl, heptyl, octyl, nonyl, decyl, undecyl, dodecyl and the like. The phrase also includes branched chain isomers of straight chain alkyl groups, including but not limited to, the following that are provided by way of example: —CH(CH₃)₂, —CH(CH₃)(CH₂CH₃), —CH(CH₂CH₃)₂, —C(CH₃)₃, —C(CH₂CH₃)₃, —CH₂CH(CH₃)₂, —CH₂CH(CH₃)(CH₂CH₃), —CH₂CH(CH₂CH₃)₂, —CH₂C(CH₃)₃, —CH₂C(CH₂CH₃)₃, —CH(CH₃)CH(CH₃)(CH₂CH₃), —CH₂CH₂CH(CH₃)₂, —CH₂CH₂CH(CH₃)(CH₂CH₃), —CH₂CH₂CH(CH₂CH₃)₂, —CH₂CH₂C(CH₃)₃, —CH₂CH₂C(CH₂CH₃), —CH(CH₃)CH₂CH(CH₃)₂, —CH(CH₃)CH(CH₃)CH(CH₃)₂, —CH(CH₂CH₃)CH(CH₃)CH(CH₃)(CH₂CH₃), and others. The term also includes cyclic alkyl groups such as cyclopropyl, cyclobutyl, cyclopentyl, cyclohexyl, cycloheptyl, and cyclooctyl and such rings substituted with straight and branched chain alkyl groups as defined above. The term also includes polycyclic alkyl groups such as, but not limited to, adamantyl norbornyl, and bicyclo[2.2.2]octyl and such rings substituted with straight and branched chain alkyl groups as defined above. Thus, the phrase unsubstituted alkyl groups includes primary alkyl groups, secondary alkyl groups, and tertiary alkyl groups. Unsubstituted alkyl groups may be bonded to one or more carbon atom(s), oxygen atom(s), nitrogen atom(s), and/or sulfur atom(s) in the parent compound. Preferred unsubstituted alkyl groups include straight and branched chain alkyl groups and cyclic alkyl groups having 1 to 20 carbon atoms. More preferred such unsubstituted alkyl groups have from 1 to 10 carbon atoms while even more preferred such groups have from 1 to 5 carbon atoms. Most preferred unsubstituted alkyl groups include straight and branched chain alkyl groups having from 1 to 3 carbon atoms and include methyl, ethyl, propyl, and —CH(CH₃)₂.

[1206] The phrase “substituted alkyl” refers to an unsubstituted alkyl group as defined above in which one or more bonds to a carbon(s) or hydrogen(s) are replaced by a bond to non-hydrogen and non-carbon atoms such as, but not limited to, a halogen atom in halides such as F, Cl, Br, and I; a phosphorus atom in groups such as phosphate and dialkyl alkylphosphonate; oxygen atom in groups such as hydroxyl groups, alkoxy groups, aryloxy groups, and ester groups; a sulfur atom in groups such as thiol groups, alkyl and aryl sulfide groups, sulfone groups, sulfonyl groups, and sulfoxide groups; a nitrogen atom in groups such as amines, amides, alkylamines, dialkylamines, arylamines, alkylarylamines, diarylamines, N-oxides, imides, and enamines; a silicon atom in groups such as in trialkylsilyl groups, dialkylarylsilyl groups, alkyldiarylsilyl groups, and triarylsilyl groups; and other heteroatoms in various other groups. Substituted alkyl groups also include groups in which one or more bonds to a carbon(s) or hydrogen(s) atom is replaced by a bond to a heteroatom such as oxygen in carbonyl, carboxyl, and ester groups; nitrogen in groups such as imines, oximes, hydrazones, and nitriles. Preferred substituted alkyl groups include, among others, alkyl groups in which one or more bonds to a carbon or hydrogen atom is/are replaced by one or more bonds to fluorine atoms. One example of a substituted alkyl group is the trifluoromethyl group and other alkyl groups that contain the trifluoromethyl group. Other alkyl groups include those in which one or more bonds to a carbon or hydrogen atom is replaced by a bond to an oxygen atom such that the substituted alkyl group contains a hydroxyl, alkoxy, aryloxy group, or heterocyclyloxy group. Still other alkyl groups include alkyl groups that have an amine, alkylamine, dialkylamine, arylamine, (alkyl)(aryl)amine,diarylamine, heterocyclylamine, (alkyl)(heterocyclyl)amine, (aryl)(heterocyclyl)amine, or diheterocyclylamine group.

[1207] The term “alkoxy” refers to RO— wherein R, for example, is alkyl such as loweralkyl defined above. Representative examples of loweralkyl alkoxy groups include methoxy, ethoxy, t-butoxy and the like.

[1208] The phrase “substituted alkoxy” refers to RO—, where R is, for example, an alkyl substituted, for example, with a halogen. RO is for example OCF₃.

[1209] The term “alkenyl” refers to a branched or straight chain groups comprising two to twenty carbon atoms that also comprises one or more carbon-carbon double bonds. Representative alkenyl groups include prenyl, 2-propenyl (i.e., allyl), 3-methyl-2-butenyl, 3,7-dimethyl-2,6-octadienyl, 4,8-dimethyl-3,7-nonadienyl, 3,7,11-trimethyl-2,6,10-dodecatrienyl and the like.

[1210] The phrase “substituted alkenyl” refers to alkenyl groups that are substituted, for example, diethyl hex-5-enylphosponate, and others with an alkyl or substituted alkyl group such as dialkyl phosphate or an ester such as an acetate ester.

[1211] The phrase “dialkyl amino” refers to an amino group substituted with two alkyl groups such as C1-20 alkyl groups.

[1212] The phrase “substituted dialkyl amino” refers to a dialkylamino substituted, for example, with a carboxylic acid, ester, hydroxy or alkoxy.

[1213] The term “hydroxyalkylthio” refers to a thio radical to which is appended a hydroxyalkyl group, where the alkyl is for example lower alkyl. An example is hydroxyethylthio, —SCH₂CH₂OH.

[1214] The term “N-alkylsulfonamide” refers to the group —SO₂NHalkyl, where alkyl is, for example, octyl.

[1215] The term “alkynyl” refers to a branched or straight chain comprising two to twenty carbon atoms that also comprises one or more carbon-carbon triple bonds. Representative alkynyl groups include ethynyl, 2-propynyl (propargyl), 1-propynyl and the like.

[1216] The term “aryl” refers to aryl groups that do not contain heteroatoms. Thus the term includes, but is not limited to, groups such as phenyl, biphenyl, anthracenyl, naphthenyl by way of example. Although the phrase “unsubstituted aryl” includes groups containing condensed rings such as naphthalene, it does not include aryl groups that have other groups such as alkyl or halo groups bonded to one of the ring members, as aryl groups such as tolyl are considered herein to be substituted aryl groups as described below. A preferred unsubstituted aryl group is phenyl. Unsubstituted aryl groups may be bonded to one or more carbon atom(s), oxygen atom(s), nitrogen atom(s), and/or sulfur atom(s) in the parent compound, however.

[1217] The phrase “substituted aryl group” has the same meaning with respect to aryl groups that substituted alkyl groups had with respect to alkyl groups. However, a substituted aryl group also includes aryl groups in which one of the aromatic carbons is bonded to one of the non-carbon or non-hydrogen atoms described above and also includes aryl groups in which one or more aromatic carbons of the aryl group is bonded to a substituted and/or unsubstituted alkyl, alkenyl, or alkynyl group as defined herein. This includes bonding arrangements in which two carbon atoms of an aryl group are bonded to two atoms of an alkyl, alkenyl, or alkynyl group to define a fused ring system (e.g. dihydronaphthyl or tetrahydronaphthyl). Thus, the phrase “substituted aryl” includes, but is not limited to tolyl, and hydroxyphenyl among others.

[1218] The term “arylalkyl” refers to a loweralkyl radical to which is appended an aryl group. Representative arylalkyl groups include benzyl, phenylethyl, hydroxybenzyl, fluorobenzyl, fluorophenylethyl and the like.

[1219] The phrase “unfused arylaryl” refers to a group or substituent to which two aryl groups, that are not condensed to each other, are bound. Exemplary unfused arylaryl compounds include, for example, phenylbenzene, diphenyldiazene, 4-methylthio-1-phenylbenzene, phenoxybenzene, (2-phenylethynyl)benzene, diphenyl ketone, (4-phenylbuta-1,3-diynyl)benzene, phenylbenzylamine, (phenylmethoxy)benzene, and the like. Preferred substituted unfused arylaryl groups include: 2-(phenylamino)-N-[4-(2-phenylethynyl)phenyl]acetamide, 1,4-diphenylbenzene, N-[4-(2-phenylethynyl)phenyl]-2-[benzylamino]acetamide, 2-amino-N-[4-(2-phenylethynyl)phenyl]propanamide, 2-amino-N-[4-(2-phenylethynyl)phenyl]acetamide, 2-(cyclopropylamino)-N-[4-(2-phenylethynyl)phenyl]acetamide, 2-(ethylamino)-N-[4-(2-phenylethynyl)phenyl]acetamide, 2-[(2-methylpropyl)amino]-N-[4-(2-phenylethynyl)phenyl]acetamide, 5-phenyl-2H-benzo[d]1,3-dioxolene, 2-chloro-1-methoxy-4-phenylbenzene, 2-[(imidazolylmethyl)amino]-N-[4-(2-phenylethynyl)phenyl]acetamide, 4-phenyl-1-phenoxybenzene, N-(2-aminoethyl)[4-(2-phenylethynyl)phenyl]carboxamide, 2-{[(4-fluorophenyl)methyl]amino}-N-[4-(2-phenylethynyl)phenyl]acetamide, 2-{[(4-methylphenyl)methyl]amino}-N-[4-(2-phenylethynyl)phenyl]acetamide, 4-phenyl-1-(trifluoromethyl)benzene, 1-butyl-4-phenylbenzene, 2-(cyclohexylamino)-N-[4-(2-phenylethynyl)phenyl]acetamide, 2-(ethylmethylamino)-N-[4-(2-phenylethynyl)phenyl]acetamide, 2-(butylamino)-N-[4-(2-phenylethynyl)phenyl]acetamide, N-[4-(2-phenylethynyl)phenyl]-2-(4-pyridylamino)acetamide, N-[4-(2-phenylethynyl)phenyl]-2-(quinuclidin-3-ylamino)acetamide, N-[4-(2-phenylethynyl)phenyl]pyrrolidin-2-ylcarboxamide, 2-amino-3-methyl-N-[4-(2-phenylethynyl)phenyl]butanamide, 4-(4-phenylbuta-1,3-diynyl)phenylamine, 2-(dimethylamino)-N-[4-(4-phenylbuta-1,3-diynyl)phenyl]acetamide, 2-(ethylamino)-N-[4-(4-phenylbuta-1,3-diynyl)phenyl]acetamide, 4-ethyl-1-phenylbenzene, 1-[4-(2-phenylethynyl)phenyl]ethan-1-one, N-(1-carbamoyl-2-hydroxypropyl)[4-(4-phenylbuta-1,3-diynyl)phenyl]carboxamide, N-[4-(2-phenylethynyl)phenyl]propanamide, 4-methoxyphenyl phenyl ketone, phenyl-N-benzamide, (tert-butoxy)-N-[(4-phenylphenyl)methyl]carboxamide, 2-(3-phenylphenoxy)ethanehydroxamic acid, 3-phenylphenyl propanoate, 1-(4-ethoxyphenyl)-4-methoxybenzene, and [4-(2-phenylethynyl)phenyl]pyrrole.

[1220] The phrase “unfused heteroarylaryl” refers to a unfused arylaryl group where one of the aryl groups is a heteroaryl group. Exemplary heteroarylaryl groups include, for example, 2-phenylpyridine, phenylpyrrole, 3-(2-phenylethynyl)pyridine, phenylpyrazole, 5-(2-phenylethynyl)-1,3-dihydropyrimidine-2,4-dione, 4-phenyl-1,2,3-thiadiazole, 2-(2-phenylethynyl)pyrazine, 2-phenylthiophene, phenylimidazole, 3-(2-piperazinylphenyl)furan, 3-(2,4-dichlorophenyl)-4-methylpyrrole, and the like. Preferred substituted unfused heteroarylaryl groups include: 5-(2-phenylethynyl)pyrimidine-2-ylamine, 1-methoxy-4-(2-thienyl)benzene, 1-methoxy-3-(2-thienyl)benzene, 5-methyl-2-phenylpyridine, 5-methyl-3-phenylisoxazole, 2-[3-(trifluoromethyl)phenyl]furan, 3-fluoro-5-(2-furyl)-2-methoxy-1-prop-2-enylbenzene, (hydroxyimino)(5-phenyl(2-thienyl))methane, 5-[(4-methylpiperazinyl)methyl]-2-phenylthiophene, 2-(4-ethylphenyl)thiophene, 4-methylthio-1-(2-thienyl)benzene, 2-(3-nitrophenyl)thiophene, (tert-butoxy)-N-[(5-phenyl(3-pyridyl))methyl]carboxamide, hydroxy-N-[(5-phenyl(3-pyridyl))methyl]amide, 2-(phenylmethylthio)pyridine, and benzylimidazole.

[1221] The phrase “unfused heteroarylheteroaryl” refers to an unfused arylaryl group where both of the aryl groups is a heteroaryl group. Exemplary heteroarylheteroaryl groups include, for example, 3-pyridylimidazole, 2-imidazolylpyrazine, and the like. Preferred substituted unfused heteroarylheteroaryl groups include: 2-(4-piperazinyl-3-pyridyl)furan, diethyl(3-pyrazin-2-yl(4-pyridyl))amine, and dimethyl {2-[2-(5-methylpyrazin-2-yl)ethynyl](4-pyridyl)}amine.

[1222] The phrase “fused arylaryl” refers to an aryl group as previously defined that is condensed, and fully conjugated to an aryl group. Representative fused arylaryl groups include biphenyl, 4-(1-naphthyl)phenyl, 4-(2-naphthyl)phenyl and the like.

[1223] The phrase “fused heteroarylaryl” refers to an aryl group as previously defined that is condensed, and fully conjugated with a heteroaryl group. Representative fused heteroarylaryl groups include quinoline, quinazoline and the like.

[1224] The phrase “fused heteroarylheteroaryl” refers to a heteroaryl group as previously defined that is condensed, and fully conjugated with another heteroaryl group. Representative fused heteroarylheteroaryl groups include pyrazalopyrimidine, imidazoquinoline and the like.

[1225] The term “aryloxy” refers to RO— wherein R is an aryl group. Representative arylalkoxy group include benzyloxy, phenylethoxy and the like.

[1226] The term “arylalkoxy” refers to a lower alkoxy radical to which is appended an aryl group. Representative arylalkoxy group include benzyloxy, phenylethoxy and the like.

[1227] The term “aryloxyaryl” refers to an aryl radical to which is appended an aryloxy group. Representative aryloxyaryl groups include 4-phenoxyphenyl, 3-phenoxyphenyl, 4-phenoxy-1-naphthyl, 3-phenoxy-1-naphthyl and the like.

[1228] The term “aryloxyarylalkyl” refers to an arylalkyl radical to which is appended an aryloxy group. Representative aryloxyarylalkyl groups include 4-phenoxyphenylmethyl, 3-phenoxyphenylmethyl, 4-phenoxyphenylethyl, 3-phenoxy-phenylethyl and the like.

[1229] The term “arylalkoxyaryl” refers to an aryl radical to which is appended an arylalkoxy group. Representative arylalkoxyaryl groups include 4-benzyloxylphenyl, 3-benzyloxyphenyl and the like.

[1230] The term “arylalkoxyarylalkyl” refers to an arylalkyl radical to which is appended an arylalkoxy group. Representative arylalkoxyarylalkyl groups include 4-benzyloxylbenzyl, 3-benzyloxybenzyl and the like.

[1231] The term “cycloalkyl” refers to an alicyclic group comprising from 3 to 7 carbon atoms including, but not limited to, cyclopropyl, cyclobutyl, cyclopentyl, cyclohexyl and the like.

[1232] The term “cycloalkylalkyl” refers to a loweralkyl radical to which is appended a cycloalkyl group. Representative examples of cycloalkylalkyl include cyclopropylmethyl, cyclohexylmethyl, 2-(cyclopropyl)ethyl and the like.

[1233] The term “halogen” refers to iodine, bromine, chlorine or fluorine; “halo” refers to iodo, bromo, chloro or fluoro.

[1234] The term “haloalkyl” refers to a lower alkyl radical, as defined above, bearing at least one halogen substituent, for example, chloromethyl, fluoroethyl or trifluoromethyl and the like.

[1235] The term “heterocyclyl” (or heterocyclic, or heterocyclo) refers to both aromatic and nonaromatic ring compounds including monocyclic, bicyclic, and polycyclic ring compounds such as, but not limited to, quinuclidyl, containing 3 or more ring members of which one or more is a heteroatom such as, but not limited to, N, O, and S. Although the phrase “unsubstituted heterocyclyl” includes condensed heterocyclic rings such as benzimidazolyl, it does not include heterocyclyl groups that have other groups such as alkyl or halo groups bonded to one of the ring members as compounds such as 2-methylbenzimidazolyl are substituted heterocyclyl groups. Examples of heterocyclyl groups include, but are not limited to: unsaturated 3 to 8 membered rings containing 1 to 4 nitrogen atoms such as, but not limited to pyrrolyl, pyrrolinyl, imidazolyl, pyrazolyl, pyridyl, dihydropyridyl, pyrimidyl, pyrazinyl, pyridazinyl, triazolyl (e.g. 4H-1,2,4-triazolyl, 1H-1,2,3-triazolyl, 2H-1,2,3-triazolyl etc.), tetrazolyl, (e.g. 1H-tetrazolyl, 2H tetrazolyl, etc.); saturated 3 to 8 membered rings containing 1 to 4 nitrogen atoms such as, but not limited to, pyrrolidinyl, imidazolidinyl, piperidinyl, piperazinyl; condensed unsaturated heterocyclic groups containing 1 to 4 nitrogen atoms such as, but not limited to, indolyl, isoindolyl, indolinyl, indolizinyl, benzimidazolyl, quinolyl, isoquinolyl, indazolyl, benzotriazolyl; unsaturated 3 to 8 membered rings containing 1 to 2 oxygen atoms and 1 to 3 nitrogen atoms such as, but not limited to, oxazolyl, isoxazolyl, oxadiazolyl (e.g. 1,2,4-oxadiazolyl, 1,3,4-oxadiazolyl, 1,2,5-oxadiazolyl, etc.); saturated 3 to 8 membered rings containing 1 to 2 oxygen atoms and 1 to 3 nitrogen atoms such as, but not limited to, morpholinyl; unsaturated condensed heterocyclic groups containing 1 to 2 oxygen atoms and 1 to 3 nitrogen atoms, for example, benzoxazolyl, benzoxadiazolyl, benzoxazinyl (e.g. 2H-1,4-benzoxazinyl etc.); unsaturated 3 to 8 membered rings containing 1 to 3 sulfur atoms and 1 to 3 nitrogen atoms-such as, but not limited to, thiazolyl, isothiazolyl, thiadiazolyl (e.g. 1,2,3-thiadiazolyl, 1,2,4-thiadiazolyl, 1,3,4-thiadiazolyl, 1,2,5-thiadiazolyl, etc.); saturated 3 to 8 membered rings containing 1 to 2 sulfur atoms and 1 to 3 nitrogen atoms such as, but not limited to, thiazolodinyl; saturated and unsaturated 3 to 8 membered rings containing 1 to 2 sulfur atoms such as, but not limited to, thienyl, dihydrodithiinyl, dihydrodithionyl, tetrahydrothiophene, tetrahydrothiopyran; unsaturated condensed heterocyclic rings containing 1 to 2 sulfur atoms and 1 to 3 nitrogen atoms such as, but not limited to, benzothiazolyl, benzothiadiazolyl, benzothiazinyl (e.g. 2H-1,4-benzothiazinyl, etc.), dihydrobenzothiazinyl (e.g. 2H-3,4-dihydrobenzothiazinyl, etc.), unsaturated 3 to 8 membered rings containing oxygen atoms such as, but not limited to furyl; unsaturated condensed heterocyclic rings containing 1 to 2 oxygen atoms such as benzodioxolyl (e.g. 1,3-benzodioxoyl, etc.); unsaturated 3 to 8 membered rings containing an oxygen atom and 1 to 2 sulfur atoms such as, but not limited to, dihydrooxathiinyl; saturated 3 to 8 membered rings containing 1 to 2 oxygen atoms and 1 to 2 sulfur atoms such as 1,4-oxathiane; unsaturated condensed rings containing 1 to 2 sulfur atoms such as benzothienyl, benzodithiinyl; and unsaturated condensed heterocyclic rings containing an oxygen atom and 1 to 2 oxygen atoms such as benzoxathiinyl. Heterocyclyl group also include those described above in which one or more S atoms in the ring is double-bonded to one or two oxygen atoms (sulfoxides and sulfones). For example, heterocyclyl groups include tetrahydrothiophene, tetrahydrothiophene oxide, and tetrahydrothiophene 1,1-dioxide. Preferred heterocyclyl groups contain 5 or 6 ring members. More preferred heterocyclyl groups include morpholine, piperazine, piperidine, pyrrolidine, imidazole, pyrazole, 1,2,3-triazole, 1,2,4-triazole, tetrazole, thiomorpholine, thiomorpholine in which the S atom of the thiomorpholine is bonded to one or more O atoms, pyrrole, homopiperazine, oxazolidin-2-one, pyrrolidin-2-one, oxazole, quinuclidine, thiazole, isoxazole, furan, and tetrahydrofuran.

[1236] The phrase “substituted heterocyclyl” refers to an heterocyclyl group as defined above in which one of the ring members is bonded to a non-hydrogen atom such as described above with respect to substituted alkyl groups and substituted aryl groups. Examples, include, but are not limited to, 2-methylbenzimidazolyl, 5-methylbenzimidazolyl, 5-chlorobenzthiazolyl, 1-methyl piperazinyl, and 2-chloropyridyl among others.

[1237] “Aminosulfonyl” refers to the group -S(O) 2-NH2. “Substituted aminosulfonyl” refersto the group —S(O)₂—NRR′ where R is loweralkyl and R′ is hydrogen or a loweralkyl. The term “aralkylaminosulfonlyaryl” refers to the group -aryl-S(O)₂—NH-aralkyl, where the aralkyl is loweraralkyl.

[1238] “Carbonyl” refers to the divalent group —C(O)—.

[1239] “Carbonyloxy” refers generally to the group —C(O)—O—,. Such groups include esters, —C(O)—O—R, where R is loweralkyl, cycloalkyl, aryl, or loweraralkyl. The term “carbonyloxycycloalkyl” refers generally to both an “carbonyloxycarbocycloalkyl” and an “carbonyloxyheterocycloalkyl”, i.e., where R is a carbocycloalkyl or heterocycloalkyl, respectively. The term “arylcarbonyloxy” refers to the group —C(O)—O-aryl, where aryl is a mono- or polycyclic, carbocycloaryl or heterocycloaryl. The term “aralkylcarbonyloxy” refers to the group —C(O)—O-aralkyl, where the aralkyl is loweraralkyl.

[1240] The term “sulfonyl” refers to the group —SO₂—. “Alkylsulfonyl” refers to a substituted sulfonyl of the structure —SO₂R— in which R is alkyl. Alkylsulfonyl groups employed in compounds of the present invention are typically loweralkylsulfonyl groups having from 1 to 6 carbon atoms in its backbone structure. Thus, typical alkylsulfonyl groups employed in compounds of the present invention include, for example, methylsulfonyl (i.e., where R is methyl), ethylsulfonyl (i.e., where R is ethyl), propylsulfonyl (i.e., where R is propyl), and the like. The term “arylsulfonyl” refersto the group —SO₂-aryl. The term “aralkylsulfonyl” refers to the group —SO₂-aralkyl, in which the aralkyl is loweraralkyl. The term “sulfonamido” refers to —SO₂NH₂.

[1241] The term “carbonylamino” refers to the divalent group —NH—C(O)— in which the hydrogen atom of the amide nitrogen of the carbonylamino group can be replaced a loweralkyl, aryl, or loweraralkyl group. Such groups include moieties such as carbamate esters (—NH—C(O)—O—R) and amides —NH—C(O)—O—R, where R is a straight or branched chain loweralkyl, cycloalkyl, or aryl or loweraralkyl. The term “loweralkylcarbonylamino” refers to alkylcarbonylamino where R is a loweralkyl having from 1 to about 6 carbon atoms in its backbone structure. The term “arylcarbonylamino” refers to group —NH—C(O)—R where R is an aryl. Similarly, the term “aralkylcarbonylamino ” refers to carbonylamino where R is a lower aralkyl.

[1242] The term “guanidino” or “guanidyl” refers to moieties derived from guanidine, H2N—C(═NH)—NH₂. Such moieties include those bonded at the nitrogen atom carrying the formal double bond (the “2”-position of the guanidine, e.g., diaminomethyleneamino, (H2N)₂C═NH—) and those bonded at either of the nitrogen atoms carrying a formal single bond (the “1-” and/or “3”-positions of the guandine, e.g., H₂N—C(═NH)—NH—). The hydrogen atoms at any of the nitrogens can be replaced with a suitable substituent, such as loweralkyl, aryl, or loweraralkyl.

[1243] Representative cycloimido and heterocycloimido groups include, for example, those shown below. These cycloimido and heterocycloimido can be further substituted and may be attached at various positions as will be apparent to those having skill in the organic and medicinal chemistry arts in conjunction with the disclosure herein.

[chemical structure]

[1244] Representative substituted amidino and heterocycloamidino groups include, for example, those shown below. These amidino and heterocycloamidino groups can be further substituted as will be apparent to those having skill in the organic and medicinal chemistry arts in conjunction with the disclosure herein.

[chemical structure]

[1245] Representative substituted alkylcarbonylamino, alkyloxycarbonylamino, aminoalkyloxycarbonylamino, and arylcarbonylamino groups include, for example, those shown below. These groups can be further substituted as will be apparent to those having skill in the organic and medicinal chemistry arts in conjunction with the disclosure herein.

[chemical structure]

[1246] Representative substituted aminocarbonyl groups include, for example, those shown below. These can heterocyclo groups be further substituted as will be apparent to those having skill in the organic and medicinal chemistry arts in conjunction with the disclosure herein.

[chemical structure]

[1247] Representative substituted alkoxycarbonyl groups include, for example, those shown below. These alkoxycarbonyl groups can be further substituted as will be apparent to those having skill in the organic and medicinal chemistry arts in conjunction with the disclosure herein.

[chemical structure]

[1248] “Substituted” refers to the definite replacement of hydrogen with one or more monovalent or divalent radicals. Suitable substitution groups include, those described herein for particular groups, as well as hydroxyl, nitro, amino, imino, cyano, halo, thio, thioamido, amidino, imidino, oxo, oxamidino, methoxamidino, imidino, guanidino, sulfonamido, carboxyl, formyl, alkyl, substituted alkyl, haloloweralkyl, loweralkoxy, haloloweralkoxy, loweralkoxyalkyl, alkylcarbonyl, arylcarbonyl, aralkylcarbonyl, heteroarylcarbonyl, heteroaralkylcarbonyl, alkylthio, aminoalkyl, cyanoalkyl, benzyl, pyridyl, pyrazolyl, pyrrole, thiophene, imidazolyl, and the like.

[1249] The term “linking moiety” refers to a covalent bond or an uncyclized divalent group, such as, for example, —CO—, —O—, —S—, —CH₂—, —NH—, and substituted or unsubstituted alkyl, alkenyl, alkynyl, carbonyl, alkoxycarbonyl groups as defined herein.

[1250] The term “SMIP compound” refers to small molecule immunopotentiating compounds, that include small molecule compounds below about MW 1000 g/mol, preferably MW 800 g/mol that are capable of stimulating or modulating a pro-inflammatory response in a patient. In an embodiment, the SMIP compounds are able to stimulate human peripheral blood mononuclear cells to produce cytokines. Preferred SMIP compounds and derivatives thereof include, for example, aminoazavinyl compounds, benzazole compounds, acylpiperazine compounds, indoledione compounds, tetrahydroisoquinoline (THIQ) compounds, anthraquinone compounds, indanedione compounds, pthalimide compounds, benzocyclodione compounds, aminobenzimidazole quinolinone (ABIQ) compounds, hydraphthalimide compounds, pyrazolopyrimidine compounds, quinazilinone compounds, quinoxaline compounds, triazine compounds, tetrahydropyrrolidinoquinoxaline compounds, pyrrole compounds, benzophenone compounds, sterol compound, and isoxazole compounds.

[1251] The term “SMIS compound” refers to small molecule immunosuppressant compounds, that include small molecule compounds below about about MW 1000 g/mol, preferably MW 800 g/mol, capable of suppressing or modulating a pro-inflammatory response in a patient.

[1252] Acylpiperazine compounds as described throughout this application include compounds of formula (III) as shown below: [chemical structure]
wherein,
[1253] R₉ is selected from the group consisting of substituted or unsubstituted aryl, heteroaryl, arylalkyl, arylalkenyl, heteroarylalkyl, and heteroarylalkenyl;
[1254] R₁₀ is substituted or unsubstituted alkyl;
[1255] n is an integer from 0-2; and
[1256] if D₁ is carbon than D₂ is oxygen, D₃ is absent, and D₄ is selected from the group consisting of substituted or unsubstituted aryl, heteroaryl, carbocycyl, alkoxyaryl, fused arylaryl, fused arylheteroaryl, and fused heteroarylaryl; or,
[1257] if D₁ is nitrogen than D₂ is nitrogen, D₄ is absent, and D₃ is selected from the group consisting of substituted or unsubstituted aryl, heteroaryl, carbocycyl, alkoxyaryl, fused arylaryl, fused arylheteroaryl, and fused heteroarylaryl.

[1258] Indoledione compounds as described throughout this application include compounds of formula (IV) as shown below: [chemical structure]
wherein,
[1259] R₁₁ and R₁₂ are independently selected from the group consisting of H, nitro, halogen, amino, hydroxy, cyano, carboxcyclic acid, and substituted or unsubstituted alkyl, aryl, heteroaryl, alkoxy, alkylcarbonyl, alkylcarbonylamino, alkylaminocarbonyl, aminocarbonyl, arylalkoxy, heteroarylalkoxy, alkylamino, arylalkylamino, arylamino, heteroarylamino, heteroarylaminoalkyl, heterocyclyl, heterocyclylalkoxy, heterocyclylalkyl, and carbocyclyl groups; and,
[1260] R₁₃ is selected from the group consisting of substituted or unsubstituted aryl, heteroaryl, arylalkyl, heteroarylalkyl, heterocyclyl, heterocyclylalkyl, and alkylbenzyl.

[1261] Tetrahydroisoquinoline (THIQ) compounds as described throughout this application include compounds of formula (V) as shown below: [chemical structure]
wherein,
[1262] L is a covalent bond or selected from the group consisting of —CH₂—, —CO—, —O—, —S—, CHF, —NH—, —NR₂₀—, where R₂₀ is lower alkyl;
[1263] R₁₄ is selected from the group consisting of hydrogen, halogen, and substituted or unsubstituted alkyl;
[1264] R₁₅ is selected from the group consisting of substituted or unsubstituted carbocyclyl, aryl, arylalkyl, alkoxyaryl, heteroaryl, heterocyclyl;
[1265] R₁₆ is selected from the group consisting of hydrogen, halogen, and substituted or unsubstituted alkyl;
[1266] R₁₇ is selected from the group consisting of hydrogen, halogen, and substituted or unsubstituted alkyl; and,
[1267] P₁₈ and R₁₉ are independently selected from the group consisting of H, hydroxy, halogen, alkoxy, amino, unsubstituted alkyl, substituted alkyl, and alkylamino.

[1268] Benzocyclodione compounds as described throughout this application include compounds of formula (VI) as shown below: [chemical structure]
wherein,
[1269] E is selected from the group consisting of NR₂₅ or CR₂₆R₂₇;
[1270] R₂₁, R₂₃, and R₂₄ are independently selected from the group consisting of H, hydroxy, halogen, alkoxy, amino, unsubstituted alkyl, substituted alkyl, and alkylamino;
[1271] R₂₂ is selected from the group consisting or H, hydroxy, halogen, alkoxy, amino, and unsubstituted or substituted alkyl, and alkylamino, arylalkyl, heteroarylalkyl, aryl, heteroaryl, arylcarbonyl, heterocyclyl, heterocyclylalkyl, and heteroarylcarbonyl;
[1272] R₂₅ is selected from the group consisting of substituted or unsubstituted aryl, heteroaryl, heterocyclyl, carbocyclyl, arylalkyl, heteroarylalkyl, and heterocyclyalkyl;
[1273] R₂₆ is selected from the group consisting of H, halogen, hydroxy, amino, and substituted or unsubstituted alkyl, carbonylalkyl, and alkylcarbonylalkyl; and,
[1274] R₂₇ is selected from the group aryl, arylalkyl, heteroarylalkyl, heterocyclyl, heterocyclylalkyl, carbocyclyl, arylcarbonylalkyl, and arylalkylcarbonyl.

[1275] Aminoazavinyl compounds as described throughout this application include compounds of formula (VII) as shown below: [chemical structure]
wherein,
[1276] G is either S or NH;
[1277] R₂₈ is selected from the group consisting of H, and substituted or unsubstituted alkyl, aryl, heteroaryl, heteroarylalkyl, arylalkyl, carbocyclyl, carbocyclylalkyl, heterocyclyl, and heterocyclylalkyl;
[1278] Q is selected from the group consisting of hydrogen, substituted alkyl, unsubstituted alkyl, and aryl, substituted aryl, heteroaryl, substituted heteroaryl, heterocyclyl, substituted heterocyclyl, fused or unfused arylaryl, substituted arylaryl, arylheteroaryl, substituted arylheteroaryl, heteroarylheteroaryl, and substituted heteroarylheteroaryl;
[1279] V₁ is selected from the group consisting of alkyl, substituted alkyl, aryl, substituted aryl, arylalkyl, substituted arylalkyl, heteroaryl, substituted heteroaryl, heteroarylalkyl, substituted heteroarylalkyl, alkoxy, substituted alkoxy, aminocarbonyl, alkoxycarbonyl, carboxyl sulfonyl, methanesulfonyl, and substituted or unsubstituted alkylcarbonyl, arylcarbonyl, aralkylcarbonyl, heteroarylcarbonyl, heteroaralkylcarbonyl, alkylcarbonyloxy, arylcarbonyloxy, aralkylcarbonyloxy, heteroarylcarbonyloxy, heteroaralkylcarbonyloxy, alkylaminocarbonyloxy, arylaminocarbonyloxy, formyl, loweralkylcarbonyl, loweralkoxycarbonyl, aminocarbonyl, aminoaryl, alkylsulfonyl, sulfonamido, aminoalkoxy, alkylamino, heteroarylamino, alkylcarbonylamino, alkylaminocarbonylamino, arylaminocarbonylamino, aralkylcarbonylamino, heteroarylcarbonylamino, arylcarbonylamino, cycloamidino, cycloalkyl, cycloimido, arylsulfonyl and arylsulfonamido; and,
[1280] V₂ is selected from the group consisting of hydrodgen, halogen, alkyl, substituted alkyl, aryl, substituted aryl, arylalkyl, substituted arylalkyl, heteroaryl, substituted heteroaryl, heteroarylalkyl, substituted heteroarylalkyl, alkoxy, substituted alkoxy, aminocarbonyl, alkoxycarbonyl, carboxyl sulfonyl, methanesulfonyl, and substituted or unsubstituted alkylcarbonyl, arylcarbonyl, aralkylcarbonyl, heteroarylcarbonyl, heteroaralkylcarbonyl, alkylcarbonyloxy, arylcarbonyloxy, aralkylcarbonyloxy, heteroarylcarbonyloxy, heteroaralkylcarbonyloxy, alkylaminocarbonyloxy, arylaminocarbonyloxy, formyl, loweralkylcarbonyl, loweralkoxycarbonyl, aminocarbonyl, aminoaryl, alkylsulfonyl, sulfonamido, aminoalkoxy, alkylamino, heteroarylamino, alkylcarbonylamino, alkylaminocarbonylamino, arylaminocarbonylamino, aralkylcarbonylamino, heteroarylcarbonylamino, arylcarbonylaamino, cycloamidino, cycloalkyl, cycloimido, arylsulfonyl and arylsulfonamido.

[1281] Lactam compounds as described throughout this application include compounds of formula (VIII) as shown below: [chemical structure]
wherein,
[1282] W₁ is selected from the group consisting of —OH, —OR₃₆ groups, —NR₃₇R₃₈;
[1283] W₂ is selected from the group consisting of O, S, and NR₃₉ groups;
[1284] R₂₉ and R₃₀ join to form a 5 to 6 membered substituted or unsubstituted ring comprising all carbon atoms or at least one O, N, or S atom;
[1285] R₃₅ and R₃₉ may be the same or different and are selected from the group consisting of H, —OH substituted and unsubstituted alkyl groups, substituted and unsubstituted aryl groups, —C(═O)H, —C(═O)-alkyl groups, and —C(═O)-aryl groups;
[1286] R₃₁, R₃₂, R₃₃, and R₃₄ may be the same or different and are independently selected from the group consisting of H, Cl, Br, F, I, —NO₂, —CN, —OH, —OR₄₀ groups, —NR₄₁R₄₂ groups, —C(═O)R₄₃ groups, —SH groups, substituted and unsubstituted amidinyl groups, substituted and unsubstituted guanidinyl groups, substituted and unsubstituted alkyl groups, substituted and unsubstituted aryl groups, substituted and unsubstituted alkenyl groups, substituted and unsubstituted alkynyl groups, substituted and unsubstituted heterocyclyl groups, substituted and unsubstituted alkylaminoalkyl groups, substituted and unsubstituted dialkylaminoalkyl groups, substituted and unsubstituted arylaminoalkyl groups, substituted and unsubstituted diarylaminoalkyl groups, substituted and unsubstituted (alkyl)(aryl)aminoalkyl groups, substituted and unsubstituted heterocyclylalkyl groups, substituted and unsubstituted aminoalkyl groups, substituted and unsubstituted heterocyclylaminoalkyl groups, substituted and unsubstituted diheterocyclylaminoalkyl groups, substituted and unsubstituted (alkyl)(heterocyclyl)aminoalkyl groups, substituted and unsubstituted (aryl)(heterocyclyl)aminoalkyl groups, substituted and unsubstituted hydroxyalkyl groups, substituted and unsubstituted alkoxyalkyl groups, substituted and unsubstituted aryloxyalkyl groups, and substituted and unsubstituted heterocyclyloxyalkyl groups;
[1287] R₃₆ is selected from the group consisting of substituted and unsubstituted alkyl groups, substituted and unsubstituted aryl groups, substituted and unsubstituted heterocyclyl groups, substituted and unsubstituted heterocyclylalkyl groups, —C(═O)H, —C(═O)-alkyl groups, —C(═O)-aryl groups, —C(═O)O-alkyl groups, —C(═O)O-aryl groups, —C(═O)NH₂, —C(═O)NH(alkyl) groups, —C(═O)NH(aryl) groups, —C(═O)N(alkyl)₂ groups, —C(═O)N(aryl)₂ groups, —C(═O)N(alkyl)(aryl) groups, —NH₂, —NH(alkyl) groups, —NH(aryl) groups, —N(alkyl)₂ groups, —N(alkyl)(aryl) groups, —N(aryl)₂ groups, —C(═O)NH(heterocyclyl) groups, —C(═O)N(heterocyclyl)₂ groups, —C(═O)N(alkyl)(heterocyclyl) groups, and —C(═O)N(aryl)(heterocyclyl) groups;
[1288] R₃₇ is selected from the group consisting of H, substituted and unsubstituted alkyl groups, substituted and unsubstituted aryl groups, and substituted and unsubstituted heterocyclyl groups;
[1289] R₃₈ is selected from the group consisting of H, substituted and unsubstituted alkyl groups, substituted and unsubstituted aryl groups, substituted and unsubstituted heterocyclyl groups, —OH, alkoxy groups, aryloxy groups, —NH₂, substituted and unsubstituted heterocyclylalkyl groups, substituted and unsubstituted aminoalkyl groups, substituted and unsubstituted alkylaminoalkyl groups, substituted and unsubstituted dialkylaminoalkyl groups, substituted and unsubstituted arylaminoalkyl groups, substituted and unsubstituted diarylaminoalkyl groups, substituted and unsubstituted (alkyl)(aryl)aminoalkyl groups, substituted and unsubstituted alkylamino groups, substituted and unsubstituted arylamino groups, substituted and unsubstituted dialkylamino groups, substituted and unsubstituted diarylamino groups, substituted and unsubstituted (alkyl)(aryl)amino groups, —C(═O)H, —C(═O)-alkyl groups, —C(═O)-aryl groups, —C(═O)O-alkyl groups, —C(═O)O-aryl groups, —C(═O)NH₂, —C(═O)NH(alkyl) groups, —C(═O)NH(aryl) groups, —C(═O)N(alkyl)₂ groups, —C(═O)N(aryl)₂ groups, —C(═O)N(alkyl)(aryl) groups, —C(═O)-heterocyclyl groups, —C(═O)—O-heterocyclyl groups, —C(═O)NH(heterocyclyl) groups, —C(═O)-N(heterocyclyl)₂ groups, —C(═O)-N(alkyl)(heterocyclyl) groups, —C(═O)-N(aryl)(heterocyclyl) groups, substituted and unsubstituted heterocyclylaminoalkyl groups, substituted and unsubstituted diheterocyclylaminoalkyl groups, substituted and unsubstituted (alkyl)(heterocyclyl)aminoalkyl groups, substituted and unsubstituted (aryl)(heterocyclyl)aminoalkyl groups, substituted and unsubstituted hydroxyalkyl groups, substituted and unsubstituted alkoxyalkyl groups, substituted and unsubstituted aryloxyalkyl groups, and substituted and unsubstituted heterocyclyloxyalkyl groups;
[1290] R₄₁ is selected from the group consisting of H, substituted and unsubstituted alkyl groups, substituted and unsubstituted aryl groups, and substituted and unsubstituted heterocyclyl groups;
[1291] R₄₂ is selected from the group consisting of H, substituted and unsubstituted alkyl groups, substituted and unsubstituted aryl groups, substituted and unsubstituted heterocyclyl groups, —C(═O)H, —C(═O)-alkyl groups, —C(═O)-aryl groups, —C(═O)NH₂, —C(═O)NH(alkyl) groups, —C(═O)NH(aryl) groups, —C(═O)N(alkyl)₂ groups, —C(═O)N(aryl)₂ groups, —C(═O)N(alkyl)(aryl) groups, —C(═O)O-alkyl groups, —C(═O)O-aryl groups, substituted and unsubstituted aminoalkyl groups, substituted and unsubstituted alkylaminoalkyl groups, substituted and unsubstituted dialkylaminoalkyl groups, substituted and unsubstituted arylaminoalkyl groups, substituted and unsubstituted diarylaminoalkyl groups, substituted and unsubstituted (alkyl)(aryl)aminoalkyl groups, substituted and unsubstituted heterocyclylalkyl groups, —C(═O)-heterocyclyl groups, —C(═O)—O-heterocyclyl groups, —C(═O)NH(heterocyclyl) groups, —C(═O)—N(heterocyclyl)₂ groups, —C(═O)—N(alkyl)(heterocyclyl) groups, —C(═O)—N(aryl)(heterocyclyl) groups, substituted and unsubstituted heterocyclylaminoalkyl groups, substituted and unsubstituted diheterocyclylaminoalkyl groups, substituted and unsubstituted (heterocyclyl)(alkyl)aminoalkyl groups, substituted and unsubstituted (heterocyclyl)(aryl)aminoalkyl groups, substituted and unsubstituted hydroxyalkyl groups, substituted and unsubstituted alkoxyalkyl groups, substituted and unsubstituted aryloxyalkyl groups, and substituted and unsubstituted heterocyclyloxyalkyl groups; and
[1292] R₄₃ is selected from the group consisting of H, —NH₂, —NH(alkyl) groups, —NH(aryl) groups, —N(alkyl)₂ groups, —N(aryl)₂ groups, —N(alkyl)(aryl) groups, —NH(heterocyclyl) groups, —N(heterocyclyl)(alkyl) groups, —N(heterocyclyl)(aryl) groups, —N(heterocyclyl)₂ groups, substituted and unsubstituted alkyl groups, substituted and unsubstituted aryl groups, —OH, substituted and unsubstituted alkoxy groups, substituted and unsubstituted heterocyclyl groups, substituted and unsubstituted aryloxy groups, heterocyclyloxy groups, —NHOH, —N(alkyl)OH groups, —N(aryl)OH groups, —N(alkyl)O-alkyl groups, —N(aryl)O-alkyl groups, —N(alkyl)O-aryl groups, and —N(aryl)O-aryl groups.

[1293] Preferably R₂₉ and R₃₀ join together to form a substituted or unsubstituted phenyl ring.

[1294] Hydropthalamide compounds as described throughout this application include compounds of formula (IX) as shown below: [chemical structure]
wherein,
[1295] R₄₄ is selected from the group consisting of substituted or unsubstituted aryl, heteroaryl, arylalkyl, heteroarylalkyl, fused arylaryl, unfused arylaryl, fused heteroarylaryl, unfused heteroarylaryl, fused arylheteroaryl, and unfused arylheteroaryl;
[1296] R₄₅, R₄₇, R₄₉, and R₅₁ may be the same or different and are independently selected from the group consisting of H, nitro, halogen, amino, hydroxy, cyano, carboxcyclic acid, and substituted or unsubstituted alkyl, aryl, heteroaryl, alkoxy, alkylcarbonyl, alkylcarbonylamino, alkylaminocarbonyl, aminocarbonyl, arylalkoxy, heteroarylalkoxy, alkylamino, arylalkylamino, arylamino, heteroarylamino, heteroarylaminoalkyl, heterocyclyl, heterocyclylalkoxy, heterocyclylalkyl, and carbocyclyl; and
[1297] R₄₆, R₄₈, R₅₀, and R₅₂ may be the same or different and are independently selected from the group consisting of H, halogen, and substituted or unsubstituted alkyl groups.

[1298] Benzophenone compounds as described throughout this application include compounds of formula (X) as shown below: [chemical structure]
wherein,
[1299] R₅₃ is independently selected from the group consisting of H, nitro, halogen, amino, hydroxy, cyano, carboxcyclic acid, and substituted or unsubstituted alkyl, aryl, heteroaryl, alkoxy, alkylcarbonyl, alkylcarbonylamino, alkylaminocarbonyl, aminocarbonyl, arylalkoxy, heteroarylalkoxy, alkylamino, arylalkylamino, arylamino, heteroarylamino, heteroarylaminoalkyl, heterocyclyl, heterocyclylalkoxy, heterocyclylalkyl, and carbocyclyl;
[1300] R₅₄ is independently selected from the group consisting of H, nitro, halogen, amino, hydroxy, cyano, carboxcyclic acid, and substituted or unsubstituted alkyl, aryl, heteroaryl, alkoxy, alkylcarbonyl, alkylcarbonylamino, alkylaminocarbonyl, aminocarbonyl, arylalkoxy, heteroarylalkoxy, alkylamino, arylalkylamino, arylamino, heteroarylamino, heteroarylaminoalkyl, heterocyclyl, heterocyclylalkoxy, heterocyclylalkyl, and carbocyclyl; and
[1301] o and p are integers from 0-4.

[1302] Isoxazole compounds as described throughout this application include compounds of formula (XI) as shown below: [chemical structure]
wherein,
[1303] R₅₅ is selected from the group consisting of substituted or unsubstituted aryl, arylalkyl, heteroaryl, heteroarylalkyl, heterocyclyl, and heterocyclylalkyl;
[1304] R₅₆ is selected from the group consisting of substituted or unsubstituted aryl, arylalkyl, heteroaryl, heteroarylalkyl, heterocyclyl, and heterocyclylalkyl; and,
[1305] R₅₇ is selected from the group consisting of H, halogen, hydoxy, and substituted or unsubstituted alkyl, aryl, heteroaryl, heterocyclyl, and carbonyl.

[1306] Sterol compounds as described throughout this application include compounds of formula (XII) as shown below: [chemical structure]
wherein,
[1307] R₅₈ is selected from the group consisting of substituted or unsubstituted aryl, arylalkyl, heteroaryl, heteroarylalkyl, heterocyclyl, and heterocyclylalkyl.

[1308] Preferably R₅₈ is a pyranone substituent.

[1309] Quinazilinone compounds as described throughout this application include compounds of formula (XIII) as shown below: [chemical structure]
wherein,
[1310] R₅₉ is selected from the group consisting of H, halogen, hydroxy, and substituted or unsubstituted alkyl, aminoalkyl, alklyaminoalkyl, alkoxy, dialkylaminoalkyl, hydroxyalkyl, alkenyl, alkynyl, carbocyclyl, carbocyclylalkyl, heterocyclyl, and heterocyclylalkyl;
[1311] R₆₀ is selected from the group consisting of substituted or unsubstituted aryl, heteroaryl, arylalkyl, heteroarylalkyl, and heterocyclylalkyl; and,
[1312] R₆₁, R₆₂, R₆₃, and R₆₄ may be the same or different and are independently selected from the group consisting of H, nitro, halogen, amino, hydroxy, cyano, carboxcyclic acid, and substituted or unsubstituted alkyl, aryl, heteroaryl, alkoxy, alkylcarbonyl, alkylcarbonylamino, alkylaminocarbonyl, aminocarbonyl, arylalkoxy, heteroarylalkoxy, alkylamino, arylalkylamino, arylamino, heteroarylamino, heteroarylaminoalkyl, heterocyclyl, heterocyclylalkoxy, heterocyclylalkyl, and carbocyclyl groups.

[1313] Pyrrole compounds as described throughout this application include compounds of formula (XIV) as shown below: [chemical structure]
wherein,
[1314] R₆₅ is selected from the group consisting of H, hydroxy, and substituted or unsubstituted alkyl, aryl, heteroaryl, heteroarylalkyl, arylalkyl, heteroarylaminoalkyl, arylaminoalkyl, heteroaryloxyalkyl, and aryloxyalkyl groups;
[1315] R₆₆, R₆₇, R₆₈, and R₆₉ may be the same or different and are independently selected from the group consisting of H, nitro, halogen, amino, hydroxy, cyano, carboxcyclic acid, and substituted or unsubstituted alkyl, aryl, heteroaryl, alkoxy, alkylcarbonyl, alkylcarbonylamino, alkylaminocarbonyl, aminocarbonyl, arylalkoxy, heteroarylalkoxy, alkylamino, arylalkylamino, arylamino, heteroarylamino, heteroarylaminoalkyl, heterocyclyl, heterocyclylalkoxy, heterocyclylalkyl, and carbocyclyl groups.

[1316] Further preferred pyrrole compounds include those shown in Formula (XV): [chemical structure]
wherein:
[1317] K₁ is nitrogen, oxygen, or optionally substituted carbon;
[1318] W is absent or is selected from the group consisting of —O—, —S—, —S(O)—, —SO₂—, —NH—, —NH—CO—, —NR′CO—, —NHSO₂—, —NR′SO₂—, —CO—, —CO₂—, —CH₂—, —CF₂—, CHF, —CONH—, —CONR′—, and —NR′—, where R′ is alkyl, substituted alkyl, cycloalkyl, aryl, heteroaryl, heterocyclo; Ar is optionally substituted aryl, heteroaryl, or a protecting group;
[1319] R₇₀ and R₇₀′ are independently selected from the group consisting of hydrogen and methyl;
[1320] R₇₁, R₇₂, R₇₃, and R₇₄ are independently selected from the group consisting of hydrogen, hydroxyl, and optionally substituted loweralkyl, cycloloweralkyl, cyclicaminoalkyl, alkylaminoalkyl, loweralkoxy, amino, alkylamino, alkylcarbonyl, arylcarbonyl, aralkylcarbonyl, heteroarylcarbonyl, heteroaralkylcarbonyl, aryl and heteroaryl;
[1321] R₇₅ and R₇₈ are independently selected from the group consisting of hydrogen, halo, and optionally substituted loweralkyl, cycloalkyl, alkoxy, amino, aminoalkoxy, carbonyloxy, aminocarbonyloxy, alkylcarbonylamino, arylcarbonylamino, aralkylcarbonylamino, heteroarylcarbonylamino, heteroaralkylcarbonylamino, cycloimido, heterocycloimido, amidino, cycloamidino, heterocycloamidino, guanidinyl, aryl, heteroaryl, heterocycloalkyl, heterocyclocarbonyloxy, heteroarylcarbonyloxy, and arylsulfonamido;
[1322] R₇₆ is selected from the group consisting of hydrogen, aryl, heteroaryl, substituted heteroaryl, heterocyclyl, and substituted heterocyclyl;
[1323] R₇₇ is selected from the group consisting of hydrogen, hydroxy, halo, carboxyl, nitro, amino, amido, amidino, imido, cyano, sulfonyl, methanesulonyl, and substituted or unsubstituted alkyl, alkoxy, alkylcarbonyl, arylcarbonyl, aralkylcarbonyl, heteroarylcarbonyl, heteroaralkylcarbonyl, alkylcarbonyloxy, arylcarbonyloxy, aralkylcarbonyloxy, heteroarylcarbonyloxy, heteroaralkylcarbonyloxy, alkylaminocarbonyloxy, arylaminocarbonyloxy, formyl, loweralkylcarbonyl, loweralkoxycarbonyl, aminocarbonyl, aminoaryl, alkylsulfonyl, sulfonamido, aminoalkoxy, alkylamino, heteroarylamino, alkylcarbonylamino, alkylaminocarbonylamino, arylaminocarbonylamino, aralkylcarbonylamino, heteroarylcarbonylamino, arylcarbonylamino, heteroarylcarbonylamino cycloamido, cyclothioamido, cycloamidino, heterocycloamidino, cycloalkyl, cycloimido, heterocycloimido, guanidinyl, aryl, heteroaryl, heterocyclo, heterocycloalkyl, arylsulfonyl and arylsulfonamido;

[1324] Anthraquinone compounds of the instant invention include, for example, compounds of Formula (XVI): [chemical structure]
wherein,
[1325] R₇₉, R₈₀, R₈₁, and R₈₂ may be the same or different and are independently selected from the group consisting of H, nitro, halogen, amino, hydroxy, cyano, carboxcyclic acid, and substituted or unsubstituted alkyl, aryl, heteroaryl, alkoxy, alkylcarbonyl, alkylcarbonylamino, sulfonyl, aminosulfonyl, alkylaminocarbonyl, aminocarbonyl, arylalkoxy, heteroarylalkoxy, alkylamino, arylalkylamino, arylamino, heteroarylamino, heteroarylaminoalkyl, heterocyclyl, heterocyclylalkoxy, heterocyclylalkyl, and carbocyclyl groups; and,
[1326] R₈₃ and R₈₄ are taken together to form a substituted or unsubstituted 5-6 membered ring containing all carbon atoms or 1-2 heteroatoms selected from the group consisting of O, S, and N.

[1327] Quinoxaline compounds referred to throughout this application include tricyclic, partially unconjugated compounds optionally substituted with nitrogen heteroatoms as shown in the preferred quinoxaline embodiment (XVII) below: [chemical structure]
wherein,
[1328] J₁ is either C or N,
[1329] J₁′ is selected from the group consisting of H, substituted aryl, unsubstituted aryl, substituted heteroaryl, and unsubstituted heteroaryl;
[1330] J₂ is either C or N,
[1331] J₂′ is selected from the group consisting of H, substituted aryl, unsubstituted aryl, substituted heteroaryl, and unsubstituted heteroaryl;
[1332] J₃ is selected from the group consisting of —CO—, —NH—, and —N═;
[1333] if J₄ is —O— then J₄′ is absent; or,
[1334] if J₄ is ═C— then J₄′ is selected from the group consisting of H and substituted or unsubstituted alkyl, alkoxy, aryl, heteroaryl, heteroarylalkyl, arylalkyl, aminoalkyl, alkylamino, and alkylthio groups; and,
[1335] R₈₅, R₈₆, R₈₇, R₈₈, and R₈₉ may be the same or different and are independently selected from the group consisting of H, nitro, halogen, amino, hydroxy, cyano, carboxcyclic acid, and substituted or unsubstituted alkyl, aryl, heteroaryl, alkoxy, alkylcarbonyl, alkylcarbonylamino, sulfonyl, aminosulfonyl, alkylaminocarbonyl, aminocarbonyl, arylalkoxy, heteroarylalkoxy, alkylamino, arylalkylamino, arylamino, heteroarylamino, heteroarylaminoalkyl, heterocyclyl, heterocyclylalkoxy, heterocyclylalkyl, and carbocyclyl groups.

[1336] Triazine compounds refer to substituted 6-membered heterocyclic groups with 3 nitrogen atoms distributed throughout the ring. The preferred embodiments of the instant invention include those shown in structures (XVIII), (XIX) and (XX) shown below: [chemical structure]
wherein,
[1337] R₉₀ is selected from the group consisting of substituted or unsubstituted alkyl, alkenyl, akynyl, aryl, heteroaryl, heteroarylalkyl, heteroarylalkenyl, arylalkyl, and arylalkenyl;
[1338] R₉₁ and R₉₃ are independently selected from the group consisting of H, and unsubstituted alkyl;
[1339] R₉₁ is aryl; preferably phenyl, [chemical structure]
   wherein,
[1340] R₉₄ is selected from the group consisting of H, amino, alkyl, aminoalkyl, and halogen;
[1341] R₉₅ is selected from the group consisting of substituted or unsubstituted aryl, arylamino, arylalkylamino, heteroaryl, heteroarylamino, and heteroalkylamino;
[1342] R₉₆ and R₉₇ are independently selected from the group consisting of H, halogen, and alkyl, preferably methyl; or,
[1343] R₉₆ may form a double bond with the nitrogen atom directly below it as indicated by the dashed line in the above structure; and, [chemical structure]
   wherein,

[1344] R₉₈ is selected from the group consisting of H, substituted alkyl, and unsubstituted alkyl; preferably methyl,
[1345] R₉₉ is selected from the group consisting of H, substituted alkyl, and unsubstituted alkyl; preferably ethyl,
[1346] R₁₀₀ is selected from the group consisting of substituted or unsubstituted aryl, heteroaryl, alkoxyaryl, arylalkyl, and heteroarylalkyl.

[1347] Benzazole compounds as described throughout this application include compounds of formula (XXI) as shown below: [chemical structure]
wherein,
[1348] A is selected from the group consisting of —O—, —S—, —NH—, and —NR₈—;
[1349] W is selected from the group consisting of —CH₂—, —O—, —S—, —NH—, and —NR₈—;
[1350] R₇ is selected from the group consisting of carbocyclyl, unfused carbocyclylcarbocyclyl, substituted aryl, unsubstituted aryl, substituted heteroaryl, unsubstituted heteroaryl, substituted fused arylheteroaryl, unsubstituted fused arylheteroaryl, substituted unfused arylaryl and unsubstituted unfused arylaryl;
[1351] R₆ is selected from the group consisting of substituted or unsubstituted aryl, and heteroaryl; and,
[1352] R₈ is independently substituted or unsubstituted alkyl.

[1353] Pyrazalopyrimidine compounds as described throughout this application include compounds of formula (XXII) as shown below: [chemical structure]
wherein,
[1354] R₁₀₁ is selected from the group consisting of H, nitro, halogen, amino, hydroxy, cyano, carboxcyclic acid, and substituted or unsubstituted alkyl, aryl, heteroaryl, alkoxy, alkylcarbonyl, alkylcarbonylamino, sulfonyl, aminosulfonyl, alkylaminocarbonyl, aminocarbonyl, arylalkoxy, heteroarylalkoxy, alkylamino, arylalkylamino, arylamino, heteroarylamino, heteroarylaminoalkyl, heterocyclyl, heterocyclylalkoxy, heterocyclylalkyl, and carbocyclyl groups;
[1355] R₁₀₂ is selected from the group consisting of H, nitro, halogen, amino, hydroxy, cyano, carboxcyclic acid, and substituted or unsubstituted alkyl, aryl, heteroaryl, alkoxy, alkylcarbonyl, alkylcarbonylamino, alkylaminocarbonyl, aminocarbonyl, arylalkoxy, heteroarylalkoxy, alkylamino, arylalkylamino, arylamino, heteroarylamino, heteroarylaminoalkyl, heterocyclyl, heterocyclylalkoxy, heterocyclylalkyl, and carbocyclyl groups;
[1356] R₁₀₃ is selected from the group consisting of H, nitro, halogen, amino, hydroxy, cyano, carboxcyclic acid, trifluoromethyl, and substituted or unsubstituted alkyl, aryl, heteroaryl, alkoxy, alkylcarbonyl, alkylcarbonylamino, alkylaminocarbonyl, aminocarbonyl, arylalkoxy, heteroarylalkoxy, alkylamino, arylalkylamino, arylamino, heteroarylamino, heteroarylaminoalkyl, heterocyclyl, heterocyclylalkoxy, heterocyclylalkyl, and carbocyclyl groups;
[1357] R₁₀₄ is selected from the group consisting of H and substituted or unsubstituted aryl, heteroaryl, arylalkoxy, heteroarylalkoxy, arylalkylamino, arylamino, heteroarylamino, heteroarylaminoalkyl, heterocyclyl, heterocyclylalkoxy, heterocyclylalkyl, carbocyclylalkyl and carbocyclyl groups;
[1358] R₁₀₅ is selected from the group consisting of H and substituted or unsubstituted aryl, heteroaryl, arylalkoxy, heteroarylalkoxy, arylalkylamino, arylamino, heteroarylamino, heteroarylaminoalkyl, heterocyclyl, heterocyclylalkoxy, heterocyclylalkyl, carbocyclylalkyl and carbocyclyl groups;
[1359] wherein at least one of R₁₀₄ and R₁₀₅ is not H.

[1360] SMIP compounds identified by in-vitro (cellular or non-cellular assays) or in-vivo methods are thoroughly described in Methods 1 and 2 below.

[1361] Pharmaceutical compositions containing the compounds of the invention may be in any form suitable for the intended method of administration, including, for example, a solution, a suspension, or an emulsion. Liquid carriers are typically used in preparing solutions, suspensions, and emulsions. Liquid carriers contemplated for use in the practice of the present invention include, for example, water, saline, pharmaceutically acceptable organic solvent(s), pharmaceutically acceptable oils or fats, and the like, as well as mixtures of two or more thereof. The liquid carrier may contain other suitable pharmaceutically acceptable additives such as solubilizers, emulsifiers, nutrients, buffers, preservatives, suspending agents, thickening agents, viscosity regulators, stabilizers, and the like. Suitable organic solvents include, for example, monohydric alcohols, such as ethanol, and polyhydric alcohols, such as glycols. Suitable oils include, for example, soybean oil, coconut oil, olive oil, safflower oil, cottonseed oil, and the like. For parenteral administration, the carrier can also be an oily ester such as ethyl oleate, isopropyl myristate, and the like. Compositions of the present invention may also be in the form of microparticles, microcapsules, liposomal encapsulates, and the like, as well as combinations of any two or more thereof.

[1362] Other additives include immunostimulatory agents known in the art. Immunostimulatory oligonucleotides and polynucleotides are described in PCT WO 98/55495 and PCT WO 98/16247. U.S. Patent Application No. 2002/0164341 describes adjuvants including an unmethylated CpG dinucleotide (CpG ODN) and a non-nucleic acid adjuvant. U.S. Patent Application No. 2002/0197269 describes compositions comprising an antigen, an antigenic CpG-ODN and a polycationic polymer. Other immunostimulatory additives described in the art may be used, for example, as described in U.S. Pat. No. 5,026,546; U.S. Pat. No. 4,806,352; and U.S. Pat. No. 5,026,543.

[1363] A controlled release delivery system may be used, such as a diffusion controlled matrix system or an erodible system, as described for example in: Lee, “Diffusion-Controlled Matrix Systems”, pp. 155-198 and Ron and Langer, “Erodible Systems”, pp. 199-224, in “Treatise on Controlled Drug Delivery”, A. Kydonieus Ed., Marcel Dekker, Inc., New York 1992. The matrix may be, for example, a biodegradable material that can degrade spontaneously in situ and in vivo for, example, by hydrolysis or enzymatic cleavage, e.g., by proteases. The delivery system may be, for example, a naturally occurring or synthetic polymer or copolymer, for example in the form of a hydrogel. Exemplary polymers with cleavable linkages include polyesters, polyorthoesters, polyanhydrides, polysaccharides, poly(phosphoesters), polyamides, polyurethanes, poly(imidocarbonates) and poly(phosphazenes).

[1364] The compounds of the invention may be administered enterally, orally, parenterally, sublingually, by inhalation spray, rectally, or topically in dosage unit formulations containing conventional nontoxic pharmaceutically acceptable carriers, adjuvants, and vehicles as desired. For example, suitable modes of administration include oral, subcutaneous, transdermal, transmucosal, iontophoretic, intravenous, intramuscular, intraperitoneal, intranasal, subdermal, rectal, and the like. Topical administration may also involve the use of transdermal administration such as transdermal patches or ionophoresis devices. The term parenteral includes subcutaneous injections, intravenous, intramuscular, intrastemal injection, or infusion techniques.

[1365] Injectable preparations, for example, sterile injectable aqueous or oleaginous suspensions may be formulated according to the known art using suitable dispersing or wetting agents and suspending agents. The sterile injectable preparation may also be a sterile injectable solution or suspension in a nontoxic parenterally acceptable diluent or solvent, for example, as a solution in 1,3-propanediol. Among the acceptable vehicles and solvents that may be employed are water, Ringer's solution, and isotonic sodium chloride solution. In addition, sterile, fixed oils are conventionally employed as a solvent or suspending medium. For this purpose any bland fixed oil may be employed including synthetic mono- or diglycerides. In addition, fatty acids such as oleic acid find use in the preparation of injectables.

[1366] Suppositories for rectal administration of the drug can be prepared by mixing the drug with a suitable nonirritating excipient such as cocoa butter and polyethylene glycols that are solid at ordinary temperatures but liquid at the rectal temperature and will therefore melt in the rectum and release the drug.

[1367] Solid dosage forms for oral administration may include capsules, tablets, pills, powders, and granules. In such solid dosage forms, the active compound may be admixed with at least one inert diluent such as sucrose lactose or starch. Such dosage forms may also comprise, as is normal practice, additional substances other than inert diluents, e.g., lubricating agents such as magnesium stearate. In the case of capsules, tablets, and pills, the dosage forms may also comprise buffering agents. Tablets and pills can additionally be prepared with enteric coatings.

[1368] Liquid dosage forms for oral administration may include pharmaceutically acceptable emulsions, solutions, suspensions, syrups, and elixirs containing inert diluents commonly used in the art, such as water. Such compositions may also comprise adjuvants, such as wetting agents, emulsifying and suspending agents, cyclodextrins, and sweetening, flavoring, and perfuming agents.

[1369] As to the mode of administration, it should be emphasized that it is the combination of therapeutic agents that gives rise to its synergistic therapeutic effect no matter whether the first and the second agent are administered together or separately. Therefore, the two agents may be given together in a single dose or in separate ones with respect to space and time.

[1370] Effective amounts of the compounds of the invention generally include any amount sufficient to detectably treat viral infections.

[1371] Successful treatment of a subject in accordance with the invention may result in the inducement of a reduction or alleviation of symptoms in a subject afflicted with a medical or biological disorder to, for example, halt the further progression of the disorder, or the prevention of the disorder.

[1372] The amount of active ingredient that may be combined with the carrier materials to produce a single dosage form will vary depending upon the host treated and the particular mode of administration. It will be understood, however, that the specific dose level for any particular patient will depend upon a variety of factors including the activity of the specific compound employed, the age, body weight, general health, sex, diet, time of administration, route of administration, rate of excretion, drug combination, and the severity of the particular disease undergoing therapy. The therapeutically effective amount for a given situation can be readily determined by routine experimentation and is within the skill and judgment of the ordinary clinician.

[1373] The compounds of the present invention can also be administered in the form of liposomes. As is known in the art, liposomes are generally derived from phospholipids or other lipid substances. Liposomes are formed by mono- or multilamellar hydrated liquid crystals that are dispersed in an aqueous medium. Any non-toxic, physiologically acceptable and metabolizable lipid capable of forming liposomes can be used. The present compositions in liposome form can contain, in addition to a compound of the present invention, stabilizers, preservatives, excipients, and the like. The preferred lipids are the phospholipids and phosphatidyl cholines (lecithins), both natural and synthetic. Methods to form liposomes are known in the art. See, for example, Prescott, Ed., Methods in Cell Biology, Volume XIV, Academic Press, New York, N.W., p. 33 et seq (1976).

[1374] While the SMIP compounds of the invention can be administered as the sole active pharmaceutical agent, they can also be used in combination with one or more other agents used in the treatment of SARSs. Other representative agents useful in combination with the compounds of the invention for the treatment of viral infections include, for example, interferon, ribavirin, gancyclovir and the like.

[1375] When additional active agents are used in combination with the compounds of the present invention, the additional active agents may generally be employed in therapeutic amounts as indicated in the PHYSICIANS' DESK REFERENCE (PDR) 53^{rd} Edition (1999), that is incorporated herein by reference, or such therapeutically useful amounts as would be known to one of ordinary skill in the art.

[1376] The compounds of the invention and the other therapeutically active agents can be administered at the recommended maximum clinical dosage or at lower doses. Dosage levels of the active compounds in the compositions of the invention may be varied so as to obtain a desired therapeutic response depending on the route of administration, severity of the disease and the response of the patient. The combination can be administered as separate compositions or as a single dosage form containing both agents. When administered as a combination, the therapeutic agents can be formulated as separate compositions that are given at the same time or different times, or the therapeutic agents can be given as a single composition.

[1377] Compounds of the present invention can be readily synthesized using the methods described herein, or other methods, that are well known in the art.

[1378] The compounds can be used in the form of salts derived from inorganic or organic acids. These salts include but are not limited to the following: acetate, adipate, alginate, citrate, aspartate, benzoate, benzenesulfonate, bisulfate, butyrate, camphorate, camphorsulfonate, digluconate, cyclopentanepropionate, dodecylsulfate, ethanesulfonate, glucoheptanoate, glycerophosphate, hemisulfate, heptanoate, hexanoate, fumarate, hydrochloride, hydrobromide, hydroiodide, 2-hydroxyethanesulfonate, lactate, maleate, methanesulfonate, nicotinate, 2-napthalenesulfonate, oxalate, pamoate, pectinate, persulfate, 3-phenylproionate, picrate, pivalate, propionate, succinate, tartrate, thiocyanate, p-toluenesulfonate and undecanoate. Also, the basic nitrogen-containing groups can be quaternized with such agents as loweralkyl halides, such as methyl, ethyl, propyl, and butyl chloride, bromides, and iodides; dialkyl sulfates like dimethyl, diethyl, dibutyl, and diamyl sulfates, long chain halides such as decyl, lauryl, myristyl and stearyl chlorides, bromides and iodides, aralkyl halides like benzyl and phenethyl bromides, and others. Water or oil-soluble or dispersible products are thereby obtained.

[1379] Examples of acids that may be employed to form pharmaceutically acceptable acid addition salts include such inorganic acids as hydrochloric acid, sulphuric acid and phosphoric acid and such organic acids as oxalic acid, maleic acid, succinic acid and citric acid. Basic addition salts can be prepared in situ during the final isolation and purification of the compounds of formula (I), or separately by reacting carboxylic acid moieties with a suitable base such as the hydroxide, carbonate or bicarbonate of a pharmaceutical acceptable metal cation or with ammonia, or an organic primary, secondary or tertiary amine. Pharmaceutical acceptable salts include, but are not limited to, cations based on the alkali and alkaline earth metals, such as sodium, lithium, potassium, calcium, magnesium, aluminum salts and the like, as well as nontoxic ammonium, quaternary ammonium, and amine cations, including, but not limited to ammonium, tetramethylammonium, tetraethylammonium, methylamine, dimethylamine, trimethylamine, triethylamine, ethylamine, and the like. Other representative organic amines useful for the formation of base addition salts include diethylamine, ethylenediamine, ethanolamine, diethanolamine, piperazine and the like.

[1380] Various compounds and methods of their synthesis are disclosed in international patent application Publication Nos. WO02/18327 (benzamide and pyridylamide based compounds); WO0222598, and WO02/18383 (ABIQ based compounds); and WO 02/81443 (pthalamide base compounds), that have been found within context of this invention to be useful for immune potentiation. The entire disclosure of these U.S. and international publications is incorporated herein by this reference. Other compounds or intermediates of interest in the present invention were purchased from commercially available sources using the following method: the chemical structure of interest was drawn into the ACD-SC database (from MDL Information Systems). A search of the following companies/institutions, among others, retrieved the identified compound's supplier and purchasing information: ASDI, ASINEX, BIONET, CHEMBRIDGE, CHEMDIV, CHEMEX, CHEMSTAR, COMGENEX, CSC, INTERBIOSCREEN, LABOTEST, MAYBRIDGE, MICROSOURCE/GENESIS, OLIVIA, ORION, PEAKDALE, RYAN SCIENTIFIC, SPECS, TIMTEC, U OF FLORIDA, and ZELINSKY.

Benzazle Compounds

### Scheme 1

[1381] Compounds of the invention containing a benzimidazole core may be prepared using a number of methods familiar to one of skill in the art. In one method, suitably functionalized diamines may be coupled with various thioisocyanates to form the intermediate thioureas. Cyclization to form the benzimidazole moiety may be effected under known conditions such as with treatment carbodiimides or alkyl halides. Alternatively the diamines may be reacted sequentially with carbonyl diimidazole and phosphoryl chloride followed by coupling with the appropriate amine.

[chemical structure]

[1382] Compounds containing the oxazole structure may similarly be prepared according to the methods above or according to other known general procedures. Haviv et. al. (J. Med. Chem. 1988, 31, 1719) describes a procedure for assembling oxazole cores wherein a hydroxy aniline is treated with ethyl potassium xanthate. The resulting sulfuryl benzoxazole may then be chlorinated and coupled with an amine.

[chemical structure]

[1383] Compounds containing a benzothiazole core may also be prepared according to known methods. An ortho-halothioisocyanate may be reacted with an amine to form a thiourea. Reduction with NaH then allows formation of the thiazole ring.

[chemical structure]

[1384] Benzothiazoles may generally be substituted in accordance with the present invention, such as through the following synthetic pathway:

[chemical structure]

### Synthesis of 4-[(2-{[4-chloro-3-(trifluoromethyl)phenyl]amino}-1H-benzimidazol-6-yl)oxyl-N-methylpyridine-2-carboxamide

[1385] The compound 4-[(2-{[4-chloro-3-(trifluoromethyl)phenyl]amino}-1H-benzimidazol-6-yl)oxy]-N-methylpyridine-2-carboxamide (159322) was synthesized as follows:

[chemical structure]

[1386] Step 1. Synthesis of 4-[(4-amino-3-nitrophenyl)oxy]-N-methylpyridine-2-carboxamide: A mixture containing 4-amino-3-nitrophenol (1 eq) and potassium bis(trimethylsilyl)amide (2 eq) was stirred in dimethylformamide for 2 hours at room temperature. To this mixture was added (4-chloro(2-pyridyl))-N-methylcarboxamide (1 eq) and potassium carbonate (1.2eq) and stirred at 90° C. for 3 days. The reaction mixture was then concentrated and partitioned between ethyl acetate and water. The organic layer was separated and washed with brine, dried, filtered, and concentrated in vacuum to give brown solid. Purification on silica gel (2% triethyl amine/50% ethyl acetate in hexane) gave 4-[(4-amino-3-nitrophenyl)oxy]-N-methylpyridine-2-carboxamide as an orange solid. The product gave satisfactory NMR. HPLC, 3.39 min; MS: MH⁺=289.

[1387] Step 2. Synthesis of 4-[(3,4-diaminophenyl)oxy]-N-methylpyridine-2-carboxamide: The mixture containing [4-(3-amino-4-nitrophenoxy)(2-pyridyl)]-N- in methanol with catalytic amount of 10% Pd/C was hydrogenated until disappearance of the yellow color to yield the product amine. HPLC, 2.5 mins; MS: MH⁺=259.

[1388] Step 3. Synthesis of 4-[(2-{[4-chloro-3-(trifluoromethyl)phenyl]amino}-1H-benzimidazol-6-yl)oxy]-N-methylpyridine-2-carboxamide: The mixture containing 4-[(3,4-diaminophenyl)oxy]-N-methylpyridine-2-carboxamide (1 eq) and 4-chloro-3-(trifluoromethyl)benzeneisothiocyanate (1 eq) in tetrahydrofuran was stirred at room temperature for 16 hours to give the corresponding thiourea. To the resulting mixture was added 1-ethyl-3-(3-dimethylaminopropyl)carbodiimide hydrochloride (2 eq) and the mixture was stirred for another 10 hours. The mixture was concentrated and partitioned between ethyl acetate and water. The organic layer was washed with brine and dried. Purification on HPLC gave 4-[(2-{[4-chloro-3-(trifluoromethyl)phenyl]amino}-1H-benzimidazol-6-yl)oxy]-N-methylpyridine-2-carboxamide. MS: MH⁺=462

### Synthesis of 4-({2-[(4-bromophenyl)amino]-1-methyl-1H-benzimidazol-5-yl}oxy)-N-methylpyridine-2-carboxamide

[1389] The compound 4-({2-[(4-bromophenyl)amino]-1-methyl-1H-benzimidazol-5-yl}oxy)-N-methylpyridine-2-carboxamide (161651) was synthesized as follows:

[chemical structure]

[1390] Step 1. Synthesis of 4-{[3-amino-4-(methylamino)phenyl]oxy}-N-methylpyridine-2-carboxamide: A solution of 4-[(4-amino-3-nitrophenyl)oxy]-N-methylpyridine-2-carboxamide (1 eq) in methylene chloride was treated with trifluoroacetic anhydride (I eq) and stirred for 10 minutes at 0° C. The mixture was quenched with satd. NaHCO₃ solution. The organic layer was separated and washed with water, brine, dried and evaporated. MS: MH⁺=385.2

[1391] To a solution of the trifluroacetamide (1 eq) in a mixture of toluene, acetonitrile and sodium hydroxide solution (50%) was added benzyltrimethylammonium chloride (1 eq) and dimethyl sulfate (1.2 eq). The biphasic mixture was stirred overnight at room temperature and evaporated. The mixture was taken up in ethyl acetate, washed with water, brine, dried and evaporated. The crude product was purified by column chromatography eluting with 1:1 hexanes and ethylacetate followed by 2% triethylamine in 1:1 hexanes and ethyl acetate followed by 2% triethylamine in 1:1 hexanes and ethyl acetate to afford N-methyl-4-{[4-(methylamino)-3-nitrophenyl]oxy}pyridine-2-carboxamide as a reddish orange solid. MS: MH⁺=303.1.

[1392] The solution of nitromethylaniline in methanol was treated with 5% palladium on carbon and stirred under hydrogen atmosphere for 15 min. (until the disappearance of yellow coloration) at room temperature. The mixture was filtered and the filtrate was concentrated to provide 0.36 g of the diamine 4-{[3-amino-4-(methylamino)phenyl]oxy}-N-methylpyridine-2-carboxamide. MS: MH⁺=273.3.

[1393] Step 2. Synthesis of 4-({2-[(4-bromophenyl)amino]-1-methyl-1H-benzimidazol-5-yl}oxy)-N-methylpyridine-2-carboxamide: A solution of the diamine 4-{[3-amino-4-(methylamino)phenyl]oxy}-N-methylpyridine-2-carboxamide (1 eq) in methanol was treated with 4-bromophenylisothiocyanate (1 eq) and stirred at 60° C.-65° C. for 2 hours. The reaction mixture was cooled down to room temperature and methyl iodide (1 eq) was added and stirred overnight at 60° C. The reaction was cooled to room temperature, evaporated, taken up in ethyl acetate, and washed with water and brine, dried, and evaporated under reduced pressure. Column chromatography using a gradient solvent system of hexanes and ethyl acetate and either 1:1 methylene chloride and acetone or 5% methanol in methylene chloride yielded the product as a half white powder. MS: MH⁺=452.3

Aminobenzimidazolylquinolinones

[1394] Compounds of structure I may be synthesized from simple starting molecules as shown in Schemes 1-4 and exemplified in the Examples. As shown in Scheme 1, compounds of structure I may generally be prepared using aromatic compounds substituted with amines and carboxylic acid groups.

[chemical structure]

[1395] As shown in Scheme 2, a substituted aromatic compound such as a substituted or unsubstituted 2-aminobenzoic acid may be reacted with an acyl halide such as methyl 2-(chlorocarbonyl)acetate to produce an amide that will react with a substituted or unsubstituted 1,2-diaminobenzene. The resulting product is a 4-hydroxy-substituted compound of structure I. One skilled in the art will recognize that the procedure set forth in Scheme 1 may be modified to produce various compounds.

[1396] A method for preparing 4-amino substituted compounds of structure I is shown in Scheme 3. As shown in Scheme 3, aromatic compounds substituted with amine and nitrile 20 groups may be used to synthesize 4-amino substituted compounds of structure I. A compound such as ethyl 2-cyanoacetate may be reacted with ethanol to produce ethyl 3-ethoxy-3-iminopropanoate hydrochloride. Subsequent reaction with a substituted or unsubstituted 1,2-phenylenediamine provides substituted or unsubstituted ethyl 2-benzimidazol-2-ylacetate. Reaction of a substituted or unsubstituted ethyl 2-benzimidazol-2-ylacetate with an aromatic compound having an amine and nitrile group such as substituted or unsubstituted 2-aminobenzonitrile with a base such as lithium bis(trimethylsilyl)amide or a Lewis acid such as tin tetrachloride provides the substituted or unsubstituted 4-amino substituted compound of structure I.

[chemical structure]

[1397] Scheme 4 illustrates a general synthetic route that allows for the synthesis of 4-dialkylamino and 4-alkylamino compounds of structure I. An inspection of Scheme 3 shows that 4-hydroxy substituted compounds of structure I may be converted into the 4-chloro derivative by reaction with phosphorous oxychloride or thionyl chloride. The 4-chloro derivative may then be reacted with an alkylamine or dialkylamine to produce the corresponding 4-alkylamino or 4-dialkylamino derivative. Deprotection affords the final 4-alkylamino or 4-dialkylamino compounds of structure I. Other groups that may be reacted with the 4-chloro derivative in this manner include, but are not limited to, ROH, RSH, and CuCN.

[chemical structure]

[1398] As shown in Scheme 5, the synthesis of compounds of structure I having a H, alkyl group, aryl group, or heterocyclyl group in the 4-position may be accomplished using a substituted or unsubstituted 2-benzimidazol-2-ylacetate prepared as shown in Schemes 3 and 4. [chemical structure]
Thiosemcarbazones

[1399] General procedure for the preparation of thiosemicarbazones

[chemical structure]

[1400] A solution of aldehyde (1.0 equiv.) and thiosemicarbazide (1.05 equiv.) in acetic acid was stirred overnight. Excess of acetic acid was removed to give a residue, that was washed with ethanol, or purified by preparative-HPLC to give the thiosemicarbazone.

### Scheme 7

[1401] A solution of aldehyde (1.0 equiv.), thiosemicarbazide (1.05 equiv.) and acetic acid (0.1 equiv.) in methanol was stirred overnight. Methanol was removed to give a residue, that was worked up as in Scheme 6.

### Scheme 8

[1402] To a solution of {[(1E)-1-aza-2-(4-fluoro-3-nitrophenyl)vinyl]aamino}-aminomethane-1-thione in ethanol was added an arylamine (2.1 equiv.). The solution was stirred at room temperature until the starting fluoride disappeared. The solution was purified to the product.

[chemical structure]

### Scheme 9

[1403] A mixture of 4-(diethylamino)-2-hydroxybenzaldehyde (1 equiv.), benzylic bromide (1.2 equiv.) and powder potassium carbonate in ethanol was stirred at room temperature for 2 days. Ethanol was removed, and the residue was dissolved in ethyl acetate and water. The organic layer was washed with aqueous NaHCO₃ and brine, dried over Na₂SO₄., and concentrated. The residue was purified on silica gel eluting with ethyl acetate/hexane to give 4-(diethylamino)-2-benzoxylic-benzaldehyde.

[1404] The aldehydes were converted to thiosemicarbazones according to Scheme 7.

[chemical structure]

### Scheme 10

[1405] A solution of 3,4-difluorobenzenecarbonitrile (1 equiv.), amine (1.5 equiv.) and DIEA (2 equiv.) in NMP was heated in a Smith Microwave (Personal Chemistry) for 30 minutes. The reaction mixture was purified on silica gel to give 4-substituted 3-fluorobenzenecarbonitrile.

[1406] To a solution of nitrile in toluene at −78° C. was added DIBAL-H (1 M in toluene, 1.5 equiv.). The reaction mixture was warmed to rt, and stirred for 16 h, and quenched with methanol/ethyl acetate/brine (1:1:4). After being stirred at rt for 30 min, the solution was extracted with ethyl acetate (3×). The combined organic layers were washed with aqueous NaHCO₃, brine and concentrated. The aldehyde was purified on silica gel or directly converted to thiosemicarbazones (Scheme 7).

### Scheme 11

[1407] A solution of 2,4,5-trifluorobenzenecarbonitrile (1 equiv.) and 4-arylpiperazine (1.2 equiv.) and DIEA (1.2 equiv.) in THF was heated at 80° C. for 2 hours. The mixture was purified on silica gel to give 4-substituted 2,5-difluorobenzenecarbonitrile.

### Scheme 12

[1408] To an alcohol (1.0 equiv) was added potassium t-butoxide in THF (1 M, 1.1 equiv). After 5 minutes, the solution was added to a solution of 4-N-substituted-2,5-difluorobenzenecarbonitrile (1 equiv.) in THF. The reaction mixture was stirred at rt overnight and quenched with aqueous ammonium chloride. The aqueous layer was extracted with ethyl acetate (3×). The combined organic layers were washed with brine, and concentrated to give a residue, that was purified to give 4-N-substituted-2-O-substituted-5-fluorobenzenecarbonitrile.

[1409] 4-N-substituted-2-O-substituted-5-fluorobenzenecarbonitrile was reduced with DIBAL-H to give a 4-N-substituted-2-O-substituted-5-fluorobenzaldehyde according to procedure in Scheme 10.

[1410] The aldehyde was converted to the corresponding thiosemicarbazone using Scheme 7.

### Scheme 13

[1411] A solution of 4-N-substituted-2,5-difluorobenzenecarbonitrile (1 equiv.), amine (1.5 equiv.) and DIEA (2 equiv.) in NMP was heated in a Smith Microwave (Personal Chemistry) for 30 minutes. The reaction mixture was purified on silica gel to give 4-N-substituted-2-N-substituted-5-fluorobenzenecarbonitrile.

[1412] 4-N-substituted-2-N-substituted-5-fluorobenzenecarbonitrile was reduced with DIBAL-H according to procedure described in Scheme 10 to give 4-N-substituted-2-N-substituted-5-fluorobenzaldehyde.

### Preparation of amino {3-[5-(3-chlorophenyl)(2-furyl)](2-pyrazolinyl)}methane-1-thione

[chemical structure]

[1414] To a solution of 5-(3-chlorophenyl)furan-2-carbaldehyde (1.0 equiv.) in THF at 0° C. was added MeMgBr in ether (3.0 equiv.) and stirred for 45 min. The reaction was quenched with water, diluted with ether and filtered through Celite. The organic layer was separated and washed with brine, dried over MgSO₄, and concentrated to give the 1-[5-(3-chlorophenyl)-2-furyl]ethan-1-ol.

[1415] To a solution of secondary alcohol(1.0 equiv.) in CH₂Cl₂ was added MnO₂ (10 equiv.). The reaction was stirred overnight, filtered through Celite, and concentrated to give 1-[5-(3-chlorophenyl)-2-furyl]ethan-1-one.

[1416] To a mixture of ketone (1.0 equiv.), paraformaldehyde (2.0 equiv.), and dimethylamine hydrochloride (2.0 equiv) and molecular sieves in ethanol was added concentrated hydrochloric acid (cat.). The reaction was refluxed overnight under nitrogen and the concentrated. A few drops of HCl was added, and the mixture was worked up with DCM and water. The organic layer was discarded. The aqueous layer was adjusted to basic and extracted with DCM (3×). The organic layer was washed with brine, dried over MgSO₄, and concentrated to yield 3-(dimethylamino)-1-[5-(3-chlorophenyl)(2-furyl)]propan-1-one.

[1417] Thiosemicarbazide (1.0 equiv.) was dissolved in MeOH upon heating under nitrogen. Aqueous sodium hydroxide (6 M, 9.0 equiv.) was added to the reaction. A methanol solution of 3-(dimethylamino)-1-[5-(3-chlorophenyl)(2-furyl)]propan-1-one (1.0 equiv) was then added dropwise to the reaction mixture. The solvent was removed and the residue was dissolved in DCM and washed with water, brine, dried over MgSO₄, and concentrated. The final compound was purified by preparative-HPLC to give amino {3-[5-(3-chlorophenyl)(2-furyl)](2-pyrazolinyl)}methane-1-thione; LC/MS m/z 306.2 (MH+); Rt=3.06 minutes.

[chemical structure]

[1418] To a solution of 4-pyridylmethylamine (1.0 equiv.) and triethylamine (2.0 equiv.) in CHCl₃ was added CS₂ (1.0 equiv.)) and stirred overnight. The reaction was cooled to 0° C. and ethyl chloroformate (1.0 equiv.) was added dropwise. The reaction was stirred for 15 min at 0° C. and then stirred at room temperature for 2 hrs followed by addition of (tert-butyl)oxycarbohydrazide (1.2 equiv.). After stirring for an addition hour the mixture was washed with aqueous citric acid (5%), saturated NaHCO₃, brine, dried over MgSO₄, and concentrated. The desired Boc protected thiosemicarbazide was purified using column chromatography.

[1419] To a solution of Boc protected thiosemicarbazide (1.0 equiv.) dissolved in DCM was added HCl in dioxane (2M, 8.3 equiv.) and stirred for 15 min. MeOH is then added to dissolve the precipitate, followed by addition of the furfural, and small amount of acetic acid (0.5 mL). The mixture is stirred overnight and the solvents are removed to give a residue purified by preparative-HPLC to give the thiosemicarbazone.

### Synthesis of 4-[4-(4-methylpiperazin-1-yl)phenoxymethyl]benzaldehyde

[chemical structure]

[1421] To a solution of 4-piperazin-1-yl phenol (1 equivalent) in CHCl₃, cooled to 0° C., was added di-t-butyl dicarbonate (1 equivalent) in CHCl₃ drop-wise. The solution was stirred at 0° C. for 1 hour before removing from the cold bath and stirring at ambient temperatures for 18 hours. The organic solution was washed aqueous NaHCO₃ and brine dried over MgSO₄ and concentrated the crude material was used without purification.

[1422] A solution of the resulting 4-(1-BOC-piperazin-4-yl)phenol (1 equivalent) in dry CH₃CN was slowly added drop-wise to a slurry of NaH (1 equivalent) in dry CH₃CN at room temperature under N₂. The slurry was stirred at room temperature for 2 hours before the solids were filtered and washed with Et₂O.

[chemical structure]

[1423] Sodium 4-(1-BOC-piperazin-4-yl)phenoxide (1 equivalent) and methyl 4-bromomethylbenzoate (1 equivalent) were combined in dry acetone and heated to reflux at 60° C. for 18 hours. The slurry was filtered and the filtrate was then concentrated to provide the crude methyl 4-[4-(1-BOC-piperazin-4-yl)phenoxymethyl]benzoate, that was used without purification.

[chemical structure]

[1424] To a slurry of LiAlH₄ (4 equivalents) in dry THF, cooled to 0° C. under N₂, was slowly added drop-wise a solution of methyl 4-[4-(1-BOC-piperazin-4-yl)phenoxymethyl]benzoate (1 equivalent) in dry THF. Once the addition was complete, the slurry was heated to reflux at 80° C. for 1 hour. The slurry was subsequently cooled to 0° C. and treated with water, 10% aq. NaOH and with water again. The resulting solids were filtered, and the filtrate was diluted with chloroform, washed with brine, dried over MgSO₄ and concentrated, providing the crude 4-[4-(4-methylpiperazin-1-yl)phenoxymethyl]benzyl alcohol that was used without purification.

[chemical structure]

[1425] To a solution of DMSO (2.6 equivalents) in dry DCM, cooled to −78° C. under N₂ was added oxalyl chloride (1.1 equivalents) in DCM drop-wise. The solution was stirred at −78° C. for 5 minutes before a solution of 4-[4-(4-methylpiperazin-1-yl)phenoxymethyl]benzyl alcohol (1 equivalent) in DCM was added drop-wise, and allowed to stir at −78° C. for another 30 minutes. Triethylamine (2.5 equivalents) was slowly dripped in before allowing the solution to reach ambient temperatures. The solution was washed with aqueous NaHCO₃ and brine, dried over MgSO₄ and concentrated to provide the crude 4-[4-(4-methylpiperazin-1-yl)phenoxymethyl]benzaldehyde that was converted to thiosemicarbazones according to Scheme 7.
Pyrroles

[chemical structure]

[chemical structure]

### Preparation of tert-butyl (2E)-3-(2,4-dichlorophenyl)prop-2-enoate (2)

[1426] Neat DIC (1.4 eq) was added to a well stirred solution of cinnamate (1 eq), t-butyl alcohol (4 eq), DMAP (1.4 eq) and CH₂Cl₂ under argon at rt. (Note—The cinnamate must be completely in solution that may require gentle warming. Allow the solution to cool to room temperature before adding the DIC. To avoid an exotherm on larger scales, it may be prudent to dilute the DIC with CH₂Cl₂ before the addition and have an ice bath ready.) After stirring for 8 hours, the reaction develops a white precipitate. The reaction may be monitored by TLC eluting with 25% EtOAc/Hexane (R_{f} of product was 0.9). The entire reaction was loaded into a separatory funnel (washing with CH₂Cl₂). The organic mixture was washed with citrate, sat. aq. NaHCO₃, water, and brine. The organic layer was dried (Na₂SO₄), filtered, and concentrated to dryness to give the crude product as an oil. The crude oil was mixed with hexane and stirred for 30 min. The precipitate that forms was filtered over celite and the filtrate was evaporated. The hexane mixture was loaded onto a filter plug of silica and eluted with EtOAc/hexane (97:2 v/v). The first eluted UV active fractions are collected and evaporated to give >99% pure 2 (75-80% yields).

[chemical structure]

### Preparation of tert-butyl 4-(2,4-dichlorophenyl)pyrrole-3-carboxylate (3)

[1427] Dry ether was added to NaH (1.5 eq as the oil dispersion) under argon. After decanting off the ether via syringe, the NaH was suspended again with fresh ether under argon. A solution of TOSMIC (1.1 eq) and 2 (1 eq) dissolved in a mixture of ether and DMSO was added dropwise to the stirred suspension of NaH at 0° C. over 20-30 min. The addition was mildly exothermic and evolved gas. After the addition, the reaction was allowed to warm to ambient rt. The progress of the reaction was followed by TLC (25% EtOAc/Hexane, the UV active product was at R_{f}=0.4) and LCMS until done (˜2-3 h). Upon completion, the reaction was carefully quenched with sat. aq. NH₄Cl (added slowly to avoid strong gas evolution and exotherm) and diluted with ether. The layers were separated and the organic phase was washed with sat. aq. NaHCO₃, water, and brine. The crude dark solid can be purified by recrystallization. Best results were achieved either through recrystallization directly from a mixture of hot EtOAc/hexane (1:3 v/v) or by dissolving the crude product in minimal hot EtOAc followed by addition of hexane (˜2 volumes of hexane based on the volume of EtOAc). The hot solutions were allowed to cool to room temperature and age over night. The crystals were first filtered and then washed with hexane giving 99% pure product in 60-70% yield.

[chemical structure]

### Preparation of tert-butyl 4-(2,4-dichlorophenyl)-1-[3-(1,3-dioxobenzo[c]azolin-2-yl)propyl]pyrrole-3-carboxylate (4)

[1428] Solid NaH (1.5 eq as the oil dispersion) was added in small portions to a solution of pyrrole 3 (1 eq) and 3-bromopropyl phthalimide (1.2 eq) dissolved in DMF stirred at room temperature and flushed with argon. NOTE—Some gas evolves, but the temperature does not seem to rise above 40-50° C. The reaction was stirred for 1.5 h at room temperature under argon. The reaction was followed by TLC (CH₂Cl₂/acetonitrile (95:5 v/v), the UV active product was at R_{f}=0.5) and LCMS. Upon completion, the reaction was quenched with sat. aq. NH₄Cl (add slowly to avoid strong gas evolution and exotherm). Sat. aq. NaHCO₃ was then added to avoid an emulsion, and the basic organic mixture was extracted with ether. The combined ether layers were washed with sat. aq. NaHCO₃, water, brine, dried Na₂SO₄, filtered, and concentrated to dryness to give the crude product. The crude product was purified by eluting through silica with EtOAc/Hexane (1:4 v/v). The purified product contained some residual 3-bromopropyl phthalimide, that did not interfere with subsequent synthetic steps. The material was taken on and used without further purification. Assume a quantitative yield.

[chemical structure]

### Preparation of tert-butyl 1-(3-aminopropyl)-4-(2,4-dichlorophenyl)pyrrole-3-carboxylate (5)

[1429] The Pthalimido Pyrrole 4 (1 eq) was dissolved in ethanol and hydrazine (3 eq) at room temperature under nitrogen. Upon heating to reflux, the reaction generated a white precipitate. Stir at reflux until complete (˜2 h) by TLC (CH₂Cl₂/acetonitrile (95:5 v/v), the UV active product was at R_{f}=0.2) and LCMS. Upon reaching completion, the reaction was allowed to cool to room temperature and the precipitate was vacuum-filtered off using a medium to fine cintered-glass filter. The filtrate was concentrated under reduced pressure to a gummy solid. The crude material was taken up in ethanol/EtOAc (1:1 v/v), stirred and the precipitate was filtered off in the same fashion as before. The filtrate was concentrated under reduced pressure and than dried in vacuo for 10-15 min. This process of adding ethanol/EtOAc, filtering and concentrating was done one more time or as needed to remove the majority of the white precipitate and residual hydrazine. The product was then dried in vacuo overnight. The material was used without further purification. Once dried, the reaction yielded the product as a glass (˜87% yield over 2 steps).

[chemical structure]

### Preparation of tert-butyl 1-{3-[(6-amino-5-nitro(2-pyridyl))amino]propyl}-4-(2,4-dichlorophenyl)pyrrole-3-carboxylate (7)

[1430] To the premixed dry reagents, pyrrole 5 (1 eq) and powdered 6-chloro-3-nitro-2-pyridylamine (6) (1.1 eq), was added the DMA followed by Hünig's base (2 eq) sequentially with stirring at rt. The reaction was then heated to 80° C. overnight. The reaction was followed by TLC (EtOAc/hexane (1:1 v/v), the UV active yellow product was at R_{f}=0.25), HPLC and LCMS. Upon completion as judged by HPLC, the reaction was allowed to cool to 70° C. Ethylene diamine (anhydrous) was then added to the reaction to destroy any remaining unreacted chloropyridine 6. After 15 min stirring at 70° C., the reaction was cooled and quenched with the addition of sat. aq. NaHCO₃. The aqueous mixture was extracted with EtOAc, and the combined organic layers were washed with sat. aq. NaHCO₃, water, brine, dried, filtered, and concentrated to dryness to give the crude product as a brown-yellow solid. The crude product was purified by flash chromatography eluted with EtOAc/hexane (4:6 v/v). The purified SnAr adduct 7 was isolated in 58% yield as a yellow solid.

[chemical structure]

### Preparation of 1-{3-[(6-amino-5-nitro(2-pyridyl))amino]propyl}-4-(2,4-dichlorophenyl)pyrrole-3-carboxylic acid (8)

[1431] In a vial, TFA (catalytic amount) was added to a stirred mixture of tert-butyl ester pyrrole 7 (1 eq), water (0.1%), and CH₂Cl₂ at rt. The vial stirred at room temperature until done (˜12 h. The reaction was then concentrated under reduced pressure at room temperature and dried in vacuo. The crude residue was dissolved again in CH₂Cl₂ and concentrated under reduced pressure at rt. The material was used in the final coupling step without further purification as the TFA salt.

[chemical structure]

### Preparation of N-((1S)-2-hydroxy-isopropyl)(1-{3-1(6-amino-5-nitro(2-pyridyl))amino]propyl}-4-(2,4-dichlorophenyl)pyrrol-3-yl)carboxamide (9,)

[1432] (2S)-(+)-2-Aminopropan-1-ol (1.5 eq) was added to a stirred mixture of acid (8) (1 eq), HBTU (1.5 eq), Hünig's base (2 eq) and DMF (premixed sequentially in this order in a vial) at room temperature under argon. The reaction was stirred for 3-4 h until complete as shown by LCMS and HPLC. The reaction mixture was subsequently diluted with EtOAc, washed with NaHCO₃, and concentrated to afford a powder in a 70% yield.

[1433] Nomenclature for the Example compounds was provided using ACD Name version 5.07 software (Nov. 14, 2001) available from Advanced Chemistry Development, Inc. Some of the compounds and starting materials were named using standard IUPAC nomenclature.

[1434] The compounds of Table 34 were synthesized following the synthetic methodology described above in the Examples and Schemes, and screened following methods 1 and 2 below. The precursors are readily recognizable by one skilled in the art and are commercially available from Aldrich (Milwaukee, Wis.) or Acros Organics (Pittsburgh, Pa.), among others.

### Screening Methods for SMIP/SMIS Compounds

Method 1

[1435] Candidate small molecule immuno-potentiators can be identified in vitro. Compounds are screened in vitro for their ability to activate immune cells. One marker of such activation is the induction of cytokine production, for example TNF-α production. Apoptosis inducing small molecules may be identified having this activity. These small molecule immuno-potentiators have potential utility as adjuvants and immuno-therapeutics.

[1436] In an assay procedure (High Throughput Screening (HTS)) for small molecule immune potentiators (SMIPs), human peripheral blood mononuclear cells (PBMC), 500,000 per mL in RPMI 1640 medium with 10% FCS, were distributed in 96 well plates (100,000 per well) already containing 5 μM of compound in DMSO. The PBMCs were incubated for 18 h at 37° C. in 5% CO₂. Their ability to produce cytokines in response to the small molecule compounds is determined using a modified sandwich ELISA.

[1437] Briefly supernatants from the PBMC cultures were assayed for secreted TNF using a primary plate bound antibody for capture followed by a secondary biotinylated anti-TNF antibody forming a sandwich. The biotinylated second antibody was then detected using streptavidin-Europium and the amount of bound europium was determined by time resolved fluorescence. SMIP compounds were confirmed by their TNF inducing activity that was measured in the assay as increased Europim counts over cells incubated in RPMI medium alone. “Hits” were selected based on their TNF-inducing activity relative to an optimal dose of lipopolysaccaride LPS (1 μg/ml), a strong TNF inducer. The robustness of the assay and low backgrounds allowed for the routine selection of hits with ˜10% of LPS activity that was normally between 5-10× background (cells alone). Selected hits are then subjected to confirmation for their ability to induce cytokines from multiple donors at decreasing concentrations. Those compounds with consistent activity at or below 5 μM are considered confirmed for the purposes of this assay. The assay is readily modified for screening for compounds effective at higher or lower concentrations.

Method 2

[1438] Each of the compounds in the above Table 34 elicited TNF-α production in human peripheral blood mononuclear cells. Many of the compounds showed activity at less than 20 μM with respect to production of TNF-α. Many of these compounds showed activity at less than 5 μM with respect to production of TNF-α. Many of these compounds showed activity in the production of TNF-α at less than 1.5 μM.

[1439] For this reason, each of the R groups of any of the compounds listed in Table 34 are preferred. Additionally, because of the excellent activity of each of the compounds, each of these compounds is individually preferred and is preferred as a member of a group that includes any or all of the other compounds and each compound is preferred in methods of modulating immunopotentiation and in methods of treating biological conditions associated therewith, for example to be used as a vaccine adjuvant. Each of the compounds is also preferred for use in preparation of medicaments for vaccines, immunopotentiation, reducing tumor growth and in treating biological conditions mediated therefrom.

[1440] In additon to the procedure described above, methods of measuring other cytokines (e.g. IL1-beta, IL-12, IL-6, IFN-gamma, IL-10 etc.) are well known in the art and can be used to find active SMIP compounds of the present invention.

[1441] Compounds may be useful that cause production of TNF-α at higher concentrations, such as 100 μM, 200 μM or 300 μM in the assays described herein. For example Loxoribine causes useful production of TNF-α at 300 μM (see Pope et al Immunostimulatory Compound 7-Allyl-8-Oxoguanosine (Loxoribine) Induces a Distinct Subset of Murine Cytokines Cellular Immunology 162: 333-339 (1995)).

[1442] The subject invention also includes isotopically-labeled antiviral compounds, that are structurally identical to those disclosed above, but for the fact that one or more atoms are replaced by an atom having an atomic mass or mass number different from the atomic mass or mass number usually found in nature. Examples of isotopes that can be incorporated into antiviral compounds of the invention include isotopes of hydrogen, carbon, nitrogen, oxygen, phosphorous, sulfur, fluorine and chlorine, such as ²H, ³H, ¹³C, ¹⁴C, ¹⁵N, ¹⁸O, ¹⁷O, ³¹P, ³²P, ³⁵S, ¹⁸F and ³⁶Cl, respectively. Antiviral compounds of the present invention, derivatives thereof, and pharmaceutically acceptable salts of said compounds and of said derivatives that contain the aforementioned isotopes and/or other isotopes of other atoms are within the scope of this invention. Certain isotopically-labeled antiviral compounds of the present invention, for example those into which radioactive isotopes such as ³H and ¹⁴C are incorporated, are useful in drug and/or substrate tissue distribution assays. Tritiated, i.e., ³H, and carbon-14, i.e., ¹⁴C, isotopes are particularly preferred for their ease of preparation and detectability. Further, substitution with heavier isotopes such as deuterium, i.e., ²H, may afford certain therapeutic advantages resulting from greater metabolic stability, for example increased in vivo half-life or reduced dosage requirements and, hence, may be preferred in some circumstances. Isotopically labeled antiviral compounds of this invention and derivatives thereof can generally be prepared by carrying out known or referenced procedures and by substituting a readily available isotopically labeled reagent for a non-isotopically labeled reagent.

[1443] In accordance with the present invention, methods are provided for the administration of an effective amount of a SMIP compound to act as an adjuvant. Also provided are immunogenic compositions comprising a SMIP compound, an antigen, and optionally other adjuvants.

[1444] As adjuvants, the SMIP compounds are combined with antigens and delivery systems to form a final immunogenic composition or vaccine product.

[1445] As immunotherapeutics, the SMIP compounds are used alone or in combination with other therapies for treatment of SARS.

[1446] Those of ordinary skill in the art will recognize that physiologically active antiviral compounds, SMIPs or SMISs that have accessible hydroxy groups are frequently administered in the form of pharmaceutically acceptable esters. The antiviral compounds of this invention can be effectively administered as an ester, formed on the hydroxy groups, just as one skilled in pharmaceutical chemistry would expect. It is possible, as has long been known in pharmaceutical chemistry, to adjust the rate or duration of action of the antiviral compound by appropriate choices of ester groups.

[1447] Other compounds that can be used in combination with the therapeutic agents described herein include, pentoxifylline (PTX), methylprednisolone, trimetrexate (Neutrexin), Zadaxin (thymosin alpha 1), optionally substituted 5-aminomethinimino-3-methyl-4-isoxazolecarboxylic acid phenylamides, cyclosporine A (CsA), 6-oxo-1,4,5-thiadiazin[2,3-b]quinazoline, 3-amino-2(1H)-thioxo-4(3H)-quinazolinone, gangciclovir, glycyrrhizin, tetracyclines, aminoglycosides, quinolones, bicyclam (1,4-Bis(1,4,8,11-tetraazacyclotetradec-1-ylmethyl)benzene octahydrochloride dihydrate), rapamycin, wortmannin, enalapril, roquinimex/linomide, inactivin, DNCB, AG7088, 9-aminocamptothecin (CPT-11), loxorobine, bropirimine, Ononase ® (ranpimase), statins, such as: lovastatin—Mevacor®, pravastatin—Pravachol®, simvastatin—Zocor®, fluvastatin—Lescol®, atorvastatin—Lipitor® and rosuvastatin—Crestor®.

[1448] As used herein, the term “effective amount” means an amount of antiviral compound of the compositions, kits and methods of the present invention that is capable of treating the symptoms of the described conditions. The specific dose of a compound administered according to this invention will, of course, be determined by the particular circumstances surrounding the case including, for example, the compound administered, the route of administration, the state of being of the patient, and the severity of the condition being treated.

[1449] The dose of an antiviral compound of this invention to be administered to a subject is rather widely variable and subject to the judgment of the attending physician. It should be noted that it may be necessary to adjust the dose of a compound when it is administered in the form of a salt, such as a laureate, the salt forming moiety of which has an appreciable molecular weight.

[1450] The following dosage amounts and other dosage amounts set forth elsewhere in this description are for an average human subject having a weight of about 65 kg to about 70 kg. The skilled practitioner will readily be able to determine the dosage amount required for a subject whose weight falls outside the 65 kg to 70 kg range, based upon the medical history of the subject and the presence of diseases, e.g., diabetes, in the subject. Calculation of the dosage amount for other forms of the free base form such as salts or hydrates is easily accomplished by performing a simple ratio relative to the molecular weights of the species involved.

[1451] In general, the pharmaceutical compositions will include at least one antiviral compound in combination with a pharmaceutically acceptable vehicle, such as saline, buffered saline, 5% dextrose in water, borate-buffered saline containing trace metals or the like. Formulations may further include one or more excipients, preservatives, solubilizers, buffering agents, lubricants, fillers, stabilizers, etc. Methods of formulation are well known in the art and are disclosed, for example, in “Remington's Pharmaceutical Sciences,” Mack Pub. Co., New Jersey (1991) or “Remington: The Science and Practice of Pharmacy,” 20^{th} ed., Lippincott Williams & Wilkins, Baltimore, Md. (2000), incorporated herein by reference.

[1452] Pharmaceutical compositions for use within the present invention can be in the form of sterile, non-pyrogenic liquid solutions or suspensions, coated capsules, suppositories, lyophilized powders, transdermal patches or other forms known in the art.

[1453] Many of the active ingredient antiviral compounds are known to be absorbed from the alimentary tract, and so it is usually preferred to administer a compound orally for reasons of convenience. However, the compounds may equally effectively be administered intravenously, subcutaneously, percutaneously, or as suppositories for absorption by the rectum or vagina, if desired in a given instance. All of the usual types of compositions may be used, including tablets, chewable tablets, capsules, solutions, parenteral solutions, troches, suppositories and suspensions. Compositions are formulated to contain a daily dose, or a convenient fraction of daily dose, in a dosage unit, that may be a single tablet or capsule or convenient volume of a liquid.

[1454] Capsules are prepared by mixing the compound or compounds with a suitable diluent and filling the proper amount of the mixture in capsules. The usual diluents include inert powdered substances such as starch of many different kinds, powdered cellulose, especially crystalline and microcrystalline cellulose, sugars such as fructose, mannitol and sucrose, grain flours and similar edible powders.

[1455] Tablets are prepared by direct compression, by wet granulation, or by dry granulation. Their formulations usually incorporate diluents, binders, lubricants and disintegrators as well as the compound or compounds. Typical diluents include, for example, various types of starch, lactose, mannitol, kaolin, calcium phosphate or sulfate, inorganic salts such as sodium chloride and powdered sugar. Powdered cellulose derivatives are also useful. Typical tablet binders are substances such as starch, gelatin and sugars such as lactose, fructose, glucose and the like. Natural and synthetic gums are also convenient, including acacia, alginates, methylcellulose, polyvinylpyrrolidine and the like. Polyethylene glycol, ethylcellulose and waxes can also serve as binders.

[1456] A lubricant is generally necessary in a tablet formulation to prevent the tablet and punches from sticking in the die. The lubricant is chosen from such slippery solids as talc, magnesium and calcium stearate, stearic acid and hydrogenated vegetable oils.

[1457] Tablet disintegrators are substances that swell when wetted to break up the tablet and release the compound or compounds. They include starches, clays, celluloses, algins and gums, more particularly, corn and potato starches, methylcellulose, agar, bentonite, wood cellulose, powdered natural sponge, cation-exchange resins, alginic acid, guar gum, citrus pulp and carboxymethylcellulose, for example, may be used as well as sodium lauryl sulfate.

[1458] Tablets are often coated with sugar as a flavor and sealant, or with film-forming protecting agents to modify the dissolution properties of the tablet. The compounds may also be formulated as chewable tablets, by using relatively large amounts of pleasant-tasting substances such as mannitol in the formulation, as is now well-established in the art.

[1459] When it is desired to administer a compound as a suppository, the typical bases may be used. Cocoa butter is a traditional suppository base, that may be modified by addition of waxes to raise its melting point slightly. Water-miscible suppository bases comprising, particularly, polyethylene glycols of various molecular weights are in wide use.

[1460] The effect of the compounds may be delayed or prolonged by proper formulation. For example, a slowly soluble pellet of the compound may be prepared and incorporated in a tablet or capsule. The technique may be improved by making pellets of several different dissolution rates and filling capsules with a mixture of the pellets. Tablets or capsules may be coated with a film that resists dissolution for a predictable period of time. Even the parenteral preparations may be made long-acting by dissolving or suspending the compound or compounds in oily or emulsified vehicles that allow dispersion slowly in the serum.

[1461] The combinations of this invention may be administered in a controlled release formulation such as a slow release or a fast release formulation. Such controlled release formulations of the combination of this invention may be prepared using methods well known to those skilled in the art. The method of administration will be determined by the attendant physician or other person skilled in the art after an evaluation of the subject's condition and requirements.

[1462] The term “prodrug” means compounds that are transformed in vivo to yield an antiviral compound of the present invention. The transformation may occur by various mechanisms, such as through hydrolysis in blood. A good discussion of the use of prodrugs is provided by T. Higuchi and W. Stella, “Pro-drugs as Novel Delivery Systems,” Vol. 14 of the A.C.S. Symposium Series, and in Bioreversible Carriers in Drug Design, ed. Edward B. Roche, American Pharmaceutical Association and Pergamon Press, 1987. The term, “prodrug” also encompasses mutual prodrugs in which one or more antiviral compounds are combined in a single molecule that may then undergo transformation to yield the individual antiviral compounds of the present invention.

[1463] For example, if an antiviral compound of the present invention contains a carboxylic acid functional group, a prodrug can comprise an ester formed by the replacement of the hydrogen atom of the acid group with a group such as (C₁-C₈)alkyl, (C₂-C₁₂)alkanoyloxymethyl, 1-(alkanoyloxy)ethyl having from 4 to 9 carbon atoms, 1-methyl-1-(alkanoyloxy)-ethyl having from 5 to 10 carbon atoms, alkoxycarbonyloxymethyl having from 3 to 6 carbon atoms, 1-(alkoxycarbonyloxy)ethyl having from 4 to 7 carbon atoms, 1-methyl-1-(alkoxycarbonyloxy)ethyl having from 5 to 8 carbon atoms, N-(alkoxycarbonyl)aminomethyl having from 3 to 9 carbon atoms, 1-(N-(alkoxycarbonyl)amino)ethyl having from 4 to 10 carbon atoms, 3-phthalidyl, 4-crotonolactonyl, gamma-butyrolacton-4-yl, di-N,N-(C₁-C₂)alkylamino(C₂-C₃)alkyl (such as β-dimethylaminoethyl), carbamoyl-(C₁-C₂)alkyl, N,N-di(C₁-C₂)alkylcarbamoyl-(C₁-C₂)alkyl and piperidino-, pyrrolidino- or morpholino(C₂-C₃)alkyl.

[1464] Similarly, if an antiviral compound of the present invention comprises an alcohol functional group, a prodrug can be formed by the replacement of the hydrogen atom of the alcohol group with a group such as (C₁-C₆)alkanoyloxymethyl, 1-((C₁-C₆)alkanoyloxy)ethyl, 1-methyl-1-((C₁-C₆)alkanoyloxy)ethyl, (C₁-C₆)alkoxycarbonyloxymethyl, N-(C₁-C₆)alkoxycarbonylaminomethyl, succinoyl, (C₁-C₆)alkanoyl, α-amino(C₁-C₄)alkanoyl, arylacyl and α-aminoacyl, or α-aminoacyl-α-aminoacyl, where each α-aminoacyl group is independently selected from the naturally occurring L-amino acids, P(O)(OH)₂, —P(O)(O(C₁-C₆)alkyl)₂ or glycosyl (the radical resulting from the removal of a hydroxyl group of the hemiacetal form of a carbohydrate).

[1465] If an antiviral compound of the present invention comprises an amine functional group, a prodrug can be formed by the replacement of a hydrogen atom in the amine group with a group such as R^{X}-carbonyl, R^{X}O-carbonyl, NR^{X}R^{X}′-carbonyl where R^{X} and R^{X}′ are each independently ((C₁-C₁₀)alkyl, (C₃-C₇)cycloalkyl, benzyl, or R^{X}-carbonyl is a natural α-aminoacyl or natural α-aminoacyl-natural α-aminoacyl, —C(OH)C(O)OY^{X} wherein (Y^{X} is H, (C₁-C₆)alkyl or benzyl), —C(OY^{X}O)Y^{X1} wherein Y^{X0} is (C₁-C₄)alkyl and Y^{X1} is ((C₁-C₆)alkyl, carboxy(C₁-C₆)alkyl, amino(C₁-C₄)alkyl or mono-N- or di-N,N—(C₁-C₆)alkylaminoalkyl, —C(Y^{X2})Y^{X3} wherein Y^{X2} is H or methyl and Y^{X3} is mono-N- or di-N,N—(C₁-C₆)alkylamino, morpholino, piperidin-1-yl or pyrrolidin-1-yl.

[1466] The compositions for use in accordance with the present invention may be formulated in a conventional manner using one or more physiologically acceptable carriers or excipients. Antiviral, SMIP, SMIS, or other immunomodulating compounds are prepared or obtained as described herein and in the U.S. Patents and published international patent applications listed in Table 1, Table 2, Table 34 and Table 35. The antiviral compounds can be formulated in pharmaceutically acceptable compositions suitable for delivery to the lungs. Particular formulations include dry powders, liquid solutions or suspensions suitable for nebulization and propellant formulations suitable for use in metered dose inhalers. The preparation of such formulations is well know to those skilled in the art, and is described in U.S. Pat. Nos. 5,814,607 and 5,654,007 and in the U.S. Patents and published international patent applications listed in Table 3 the disclosures of which are incorporated herein by reference.

[1467] Dry powder formulations will comprise an antiviral compound in a dry, optionally lyophilized form with a particle size within a preferred range for deposition within the lung. Typically the particle size for deposition in the lung will range between 1 and 5 μm. When systemic delivery of the antiviral compound via absorption from the lung into the bloodstream is desired the antiviral compound formulation particle size is generally between 0.1 and 2 μm in size. The preferred size range of particles can be produced using methods such as jet-milling, spray drying and solvent precipitation, for example. Dry powder devices typically require a powder mass in the range from about 1 mg to 100 mg to produce an aerosolized dose. Thus, the antiviral compound will typically be combined with a pharmaceutically acceptable dry bulking powder. Preferred dry bulking powders include sucrose, lactose, trehalose, human serum albumin (HSA), phospholipids and glycine as well as those disclosed in the documents listed in Table 3. Dry powders can be administered to the subject in conventional dry powder inhalers. For liquid formulations the antiviral compound can be dissolved in any recognized physiologically acceptable carrier for use in delivery of aerosolized formulations. Such carriers include buffered and unbuffered aqueous solutions for water soluble compounds, and physiological solutions including saline solution (preferably between 0.2 and 2 N NaCl). For antiviral compounds with limited solubility, other liquid vehicles such as ethanol, propylene glycol and ethanol-propylene combinations may be used. The antiviral compounds may also be administered as solids in suspension.

[1468] For administration by inhalation, the compositions for use according to the present invention are conveniently delivered in the form of an aerosol spray administered via pressurized packs or a nebulizer, with the use of a propellant, e.g., air, dichlorordifluoromethane, dichloroterafluoroethane or other suitable gas. Preferably, for incorporation into the aerosol propellant, the antiviral compound formulations of the present invention will be processed into respirable particles as described above for the dry powder formulations. The particles are then suspended in the propellant, optionally being coated with a surfactant to enhance their disbursement. In the use of a pressurized aerosol the dosage unit may be determined by providing a valve to deliver a metered amount.

[1469] Commercially available jet nebulizers are available and may be used to deliver aerosolized antiviral compound to a subject. Such jet nebulizers include, but are not limited to, those supplied by AeroTech 11 (CIS-US, Bedford, Mass.). In addition, for delivery of aerosolized antiviral compound to the lungs of a subject an oxygen source can be attached to the nebulizer providing a flow rate of, for example, 10 L/min. In general, inhalation is performed over a 5-40 minute time interval through a mouthpiece during spontaneous respiration. The present invention provides for novel compositions comprising a suitable carrier and aerosolized antiviral compound in doses sufficient to reduce or ameliorate viral load and SARS symptoms in subjects having SARS. Such doses can be lower than corresponding systemic doses that may be used to those generally used to reduce or ameliorate viral load and SARS symptoms in subjects having SARS.

[1470] The antiviral, SMIP, SMIS, and immunomodulating compositions of the present invention may be administered with a steroidal anti-inflammatory drug for the treatment of SARS and SARS symptoms. Examples of steroidal anti-inflammatory drugs of the invention include hydrocortisone, prednisolone, dexamethasone, triamcinolone acetonide, fluocinolone acetonide, fludrocortisone acetate, betamethasone, etc.

[1471] The antiviral compound composition of the invention is nebulized predominantly into particle sizes allowing a delivery of the drug into the terminal and respiratory bronchioles. For efficacious delivery of antiviral compound to the lung endobronchial space of airways in an aerosol, the formation of aerosol particles having mass medium average diameter predominantly between 1 to 5 μm is necessary. The formulation must additionally provide conditions that would not adversely affect the functionality of the airways. Consequently, the formulation must contain enough of the drug formulated under the conditions that allow its efficacious delivery while avoiding undesirable reaction.

[1472] For liquid solutions and suspensions, the choice of the nebulizer is made from among commercially available nebulizers. The jet nebulizers known as Sidestream O, obtained from Medicaid and Pari LCS, LC Plus, and eFlow obtained from Pari Respiratory Equipment, Richmond, Va., are examples of typical nebulizers suitable for the practice of the invention. Ultrasonic nebulizers that produce appropriate particle sizes of about 1 to 5 μm such as Aerosonic by DeVilbiss and UltraAire by Omron are also suitable.

[1473] Advantageously, the present invention also provides for a kit for use by a consumer for the treatment and/or prevention of SARS. Such a kit comprises: (a) a pharmaceutical composition comprising a therapeutically effective amount of at least one compound from among those described herein or listed in Table 34 and Table 35 or described in the U.S. Patents and published international patent applications listed in Table 1, Table 2, and Table 35 and a pharmaceutically acceptable carrier, vehicle or diluent; (b) a container for holding the pharmaceutical composition; and, optionally, (c) instructions describing a method of using the pharmaceutical compositions for the treatment and or the prevention of SARS. The kit may optionally contain a plurality of antiviral compounds for the treatment of SARS wherein the anti viral compounds are selected from 3C-like protease inhibitors and papain-like protease inhibitors. In a further embodiment, the kit contains an antiviral compound which is an RNA-dependent RNA polymerase inhibitor. When the kit comprises more than one antiviral compound, the antiviral compounds contained in the kit may be optionally combined in the same pharmaceutical composition.

[1474] A “kit” as used in the instant application includes a container for containing the separate compositions such as a divided bottle or a divided foil packet. The container can be in any conventional shape or form as known in the art that is made of a pharmaceutically acceptable material, for example a paper or cardboard box, a glass or plastic bottle or jar, a re-sealable bag (for example, to hold a “refill” of tablets for placement into a different container), or a blister pack with individual doses for pressing out of the pack according to a therapeutic schedule. The container employed can depend on the exact dosage form involved, for example a conventional cardboard box would not generally be used to hold a liquid suspension. It is feasible that more than one container can be used together in a single package to market a single dosage form. For example, tablets may be contained in a bottle that is in turn contained within a box.

[1475] An example of such a kit is a so-called blister pack. Blister packs are well known in the packaging industry and are being widely used for the packaging of pharmaceutical unit dosage forms (tablets, capsules, and the like). Blister packs generally consist of a sheet of relatively stiff material covered with a foil of a preferably transparent plastic material. During the packaging process, recesses are formed in the plastic foil. The recesses have the size and shape of individual tablets or capsules to be packed or may have the size and shape to accommodate multiple tablets and/or capsules to be packed. Next, the tablets or capsules are placed in the recesses accordingly and the sheet of relatively stiff material is sealed against the plastic foil at the face of the foil that is opposite from the direction in which the recesses were formed. As a result, the tablets or capsules are individually sealed or collectively sealed, as desired, in the recesses between the plastic foil and the sheet. Preferably the strength of the sheet is such that the tablets or capsules can be removed from the blister pack by manually applying pressure on the recesses whereby an opening is formed in the sheet at the place of the recess. The tablet or capsule can then be removed via said opening.

[1476] It maybe desirable to provide a written memory aid, where the written memory aid is of the type containing information and/or instructions for the physician, pharmacist or subject, e.g., in the form of numbers next to the tablets or capsules whereby the numbers correspond with the days of the regimen which the tablets or capsules so specified should be ingested or a card that contains the same type of information. Another example of such a memory aid is a calendar printed on the card e.g., as follows “First Week, Monday, Tuesday,” . . . etc . . . . “Second Week, Monday, Tuesday, . . . ” etc. Other variations of memory aids will be readily apparent. A “daily dose” can be a single tablet or capsule or several tablets or capsules to be taken on a given day. Also a daily dose of one or more component(s) of the kit can consist of one tablet or capsule while a daily dose of another one or more component(s) of the kit can consist of several tablets or capsules.

[1477] Another specific embodiment of a kit is a dispenser designed to dispense the daily doses one at a time in the order of their intended use. Preferably, the dispenser is equipped with a memory-aid, so as to further facilitate compliance with the regimen. An example of such a memory-aid is a mechanical counter that indicates the number of daily doses that has been dispensed. Another example of such a memory-aid is a battery-powered micro-chip memory coupled with a liquid crystal readout, or audible reminder signal which, for example, reads out the date that the last daily dose has been taken and/or reminds one when the next dose is to be taken.

### EXAMPLES

### Example 1

### Example of a SARS Virus Isolate

[1478] A SARS virus was isolated from clinical specimens of a patient in Frankfurt, Germany (FRA). The isolate was grown in Vero cells. RNA of the SARS virus was extracted and amplified by RT-PCR. Nucleotide sequence of the viral genome was determined by direct sequencing of the PCR product. Computer analysis was used to predict the features of the genome, to compare it to previously known coronaviruses and to the sequence of different SARS virus isolates.

[1479] More specifically, isolation and sequence was performed as follows. After the third passage of the SARS virus in Vero cells, viral particles were purified by ultra centrifugation from 3×10⁷ cells supernatant. Viral RNA was extracted by Triazol method (Gibco-BRL). Viral RNA (200 ng) was transcribed into cDNA with avian RNaseH-thermostable reverse transcriptase following the instructions of the manufacturer (ThermoScript RT System, Invitrogen). Briefly, either 50 pmoles of oligo (dT)₂₀ (SEQ ID NO: 7389) or 25 ng of random hexamers were used to prime the RT reaction in a 20 μl final volume. Amplification and sequencing of the SARS genome were accomplished by direct sequencing of PCR products obtained with: i) specific primers from conserved regions of homology found through multiple alignment among known coronaviruses; ii) oligonucleotides designed around short sequences of SARS isolates available on the Web through WHO network laboratories; iii) degenerate primers to amplify the cDNA mixture with multiple overlapping fragments as end products. Gap closure was realized by long distance PCR with high fidelity Taq (Expand High Fidelity system, Roche) using primers designed on selected fragments. Sequence was collected by primer walking using a BigDye terminator chemistry (Applied Biosystems) and an automated DNA sequencer (3700 capillary model, Applied Biosystems). After obtaining a first pass of the entire genome, a set of both forward and reverse primers were used to amplify and sequence de novo the genome using as a template DNA segments of 2 kb on average. Readings from overlapping fragments were automatically assembled by AutoAssembler (Applied Biosystems) and the 29,740 bp contiguous edited manually.

[1480] Computer analysis of the sequence was performed as follows. The GCG Wisconsin Package suite (version 10.0) was used for computer analysis of gene and protein sequences. The PSORT program (http://psort.nibb.ac.jp/) was used for localization predictions. For secondary structure analysis, the PHD software available on the Web at http://cubic.bioc.columbia.edu/predictprotein/was applied. The PSI-BLAST algorithm was used for homology searches (http://www.ncbi.nlm.nih.gov/blast) using the non-redundant protein database. ClustalW was applied to obtain multiple sequence alignments of gene and protein sequences. The LeamCoil-VMF program was used to predict coiled-coil regions in the spike proteins (http://learncoil-vmf.lcs.mit.edu/cgi-bin/vmf). Leucine zippers were predicted with the program 2ZIP, available at http://2Zip.molgen.mpg.de.

[1481] Phylogenetic analysis was performed using the neighbor-joining algorithm as implemented in the program NEIGHBOR within the Phylogeny Inference Package (Phylip) (Felsenstein J 1993, program distributed by the author). Bootstrap analysis was always performed with 100 replicates using the program Seqboot. Trees were handled and displayed using TreeView. The program HMMER was used to generate sequence profiles from multiple sequence alignments of the S1 domains of spike proteins. Subsequently, the HMMPFAM program was used to compare the S1 domain of SARS spike to the profiles.

[1482] The genome of this SARS virus isolate is 29,740 bases long and the overall structure of the genome is similar to that of the three known groups of coronaviruses. Starting from the 5′ end a leader sequence, an untranslated region (UTR) and two overlapping open reading frames coding for one polyprotein containing the enzymes necessary for replication can be identified. They are followed by a region coding for the spike (S), envelope (E), matrix (M), nucleocapsid (N) structural proteins and eight additional ORFs specific for the SARS virus. At the 3′-end of the genome a UTR with a poly(A) is located. The overall homology to coronaviruses groups 1, 2 and 3 is low and therefore the SARS virus belongs to a new group (group 4) of coronavirus. More detailed analysis of the spike protein amino acid sequence shows that the SARS virus isolate is more closely related to coronavirus group 2.

[1483] The complete genome sequence of the SARS virus isolate is 29,740 bp in length. The sequence is available on Genbank and has a GC content of 40.8%, comparable with that of known viruses of the same family. Genome structure is similar to that of other coronaviruses. 14 open reading frames have been predicted. The principal features of the genome and gene products are illustrated reported in FIG. 17 and Table 10. The comparison between the SARS genome and those of group 1, 2 and 3 coronaviruses is reported in FIG. 18.

[1484] Nucleotides 1-73 contain a predicted RNA leader sequence followed by an untranslated region (UTR) of 197 nucleotides. The UTR is followed by two overlapping open reading frames (ORF1a, ORF1b), which encompass two-thirds of the genome (nucleotides 265-21485). They encode for a large polyprotein, which is predicted to be processed by viral proteases to generate the replicase complex. The 3′ part of the genome contains the genes coding for the four structural proteins (S, spike protein, E, envelope protein, M, matrix glycoprotein, and N, nucleocapsid protein), and eight predicted ORFs of unknown function (FIG. 17). Finally, at the 3′ end of the genome, we found a second UTR of 340 bases followed by a poly(A) tract. We identified a putative intergenic (IG) sequence also referred to as transcription-associated sequence (TAS), which is a typical feature for coronaviruses. The IG sequence is characterized by 6-18 nucleotides present at the 3′ end of the leader and can be found in front of each gene. The IG sequence plays a key role in RNA transcription and its regulation. The IG sequence of the SARS virus is characterized by the sequence SEQ ID NO: 7293 and is present nine times in the genome (FIG. 17). The sequence of the leader and IG are peculiar for each coronavirus and represent a specific signature for the virus.

The Replicase Region

[1485] The replicase gene, ORF1ab (SEQ ID NO: 7232), consists of two overlapping ORFs, ORF1a and ORF1b, which can be translated as a single polyprotein by frame shift of the ribosome in position 13,393, within the polymerase encoding region. See Brierley et al, Embo J 1987: 6(12): 3779-3785. As expected, a stem-loop sequence is present ten base pairs downstream of this site (SEQ ID NO: 7390; 5′-CGGTGTAAGTGCAGCCCGTCTTACACCG-3′). The polyprotein is cleaved co- and/or post-translationally into multiple proteins by its own encoded proteases. Using the cleavage consensus sequence and by analogy with other coronaviruses, we have mapped the possible cleavage sites of the polyprotein and have identified 14 products, which comprise the leader protein p28, the homologue of the MHV p65 protein and other twelve proteins, named from nsp1 to nsp13 (nsp, non structural protein) (FIG. 17 and Table 10). The amino acid sequence analysis suggests the presence of several functional motifs within the putative ORF1ab proteins. In particular, we have mapped two potential proteases (nsp1 and nsp2), one growth factor-like motif (nsp7) within ORF1a, whereas in ORF1b we identified the RNA polymerase (nsp9), and a predicted helicase (nsp10). The other predicted cleavage products (nsp3, nsp4, nsp5, nsp6, nsp11, nsp12 and nsp13) are proteins of unknown function. Many of these proteins are presumably present in the RNA replication complex, which is associated with the membranous structures in the infected cells. In particular, nsp3 and nsp4 contain hydrophobic domains. As shown in FIG. 18, the replicase region of SARS has a similar organization to group 1, 2 and 3 coronaviruses; however, the overall aminoacid conservation is low (Table 11). The most conserved proteins are the polymerase and the helices.

[1486] Nsp1 is the papain-like cysteine protease (PLP), which cleaves the first two protein products (leader protein p28 and p65 homologue). Within the nsp1 of MHV, two domains with papain-like protease activity (PLP1 and PLP2) have been mapped, (Kanjanahaluethai et al (2000) J. Virol 74(17):7911-21) which are also conserved with Bovine, transmittable gastroenteritis virus (TGV) and Human 229E coronaviruses. However, by sequence alignment with the SARS nsp 1, we identified only one PLP domain containing the catalytic residues Cys833 and His994.

[1487] Nsp2 is the chymotrypsin-picornavirus 3C-like protease (3CLp), which is responsible for the post-translational processing of the other 12 proteins, most of them cleaved at Q/A or Q/S sites. (Ziebuhr et al (1999) J. Virol 73(1):177-85). It also performs autoproteolytic activity. The principal catalytic residues are well conserved with other coronaviruses and are located at position His41 and Cys145. Furthermore, even the conserved aminoacids Tyr161 and His163, which are believed to be involved in substrate recognition and to be indispensable for proteolytic activity, (Hegyi et al (2002) J. Gen Virol 83(Pt3):581-593) were found in the sequence of the SARS 3CLp.

[1488] The invention includes the orflab sequence of SEQ ID NO: 9960 and the orfla sequence of SEQ ID NO: 9961, including fragments, variants, homologs, etc. thereof.

The Structural Region

[1489] Analysis of the nucleotide sequence at the 3′ part of the SARS genome identified 12 predicted open reading frames. They are coded within 8.2 kb and comprise the four structural proteins S, E, M and N, common for all coronaviruses and eight predicted ORFs, which are specific for this virus (FIG. 18). SARS-specific IG sequences upstream of most ORFs (FIGS. 17 & 18) suggest that most genes are likely to be transcribed independently. Interestingly, sequences identical to the group 2 IG are also present at the end of the RNA leader and in front of the Matrix encoding gene and of ORF 10.

[1490] The spike is a type I glycoprotein, which forms the large spikes on the surface of the virion and is responsible for receptor-binding and membrane fusion. (Gallagher (2001) Adv Exp Med Biol 494: 183-92). The protein is 1255 residues long with 17 predicted N-glycosylation sites. It has a 13aa leader peptide and a 17 aa C-terminal membrane anchoring sequence (1202-1218). Some (MHV, HCoV-OC43, AIBV and BCoV), but not all (TGV, FIPV, HCoV-229E) coronavirus spike proteins are proteolytically cleaved in two subunits, S1 and S2. S1 is supposed to form the bulbous head, which stays non-covalently linked to the C-terminal membrane anchor. Cleavage is mediated by a basic aminoacid sequence, which resembles the consensus sequence for a furin cleavage site. (Garten et al., Biochimie 1994; 76(3-4): 217-225). However, in case of this SARS virus isolate, we were not able to identify such a sequence, implicating that the S protein of this SARS virus isolate is unlikely to be cleaved during maturation. Secondary structure predictions indicated that the global architecture of the spike protein is conserved within all known coronaviruses. The S1 domain is mainly formed by beta sheets and likely adopts a globular fold, while in the S2 domain extensive alpha helical regions are predicted. In addition, the LearnCoil-VMF program, specifically designed to identify coiled-coil-like regions in viral membrane-fusion proteins, predicts two coiled-coils within S2, spanning aminoacids 900-1005 and 1151-1185, respectively (FIG. 19). Both coiled-coil regions contain a leucine-zipper motif, which is also present in the spikes of all coronaviruses. Leucine zippers are known to promote protein oligomerization; since the spike proteins of TGV and MHV form hetero-trimers, (Delmas et al, J Virol 1990; 64(11):5367-5375) (Godeke, et al., J Virology 2000; 74(3):1566-1571) it is conceivable that in SARS leucine zippers play a role in promoting and/or stabilizing a similar quaternary structure. The spike protein plays a major role in the biology of coronaviruses because the S1 domain contains the receptor-binding domain and the virus neutralizing epitopes, while the S2 domain is involved in the process of membrane fusion, which is essential for virus infectivity. As expected, multiple sequence alignment of different spike proteins showed a major degree of variability within the S1 domain, whereas S2 is more conserved.

[1491] The envelope protein E is a very short polypeptide of 76 aa, involved in the morphogenesis of the virion envelope. (Godet et al., Virology 1992; 188(2):666-675). Computer analysis predicts a long transmembrane domain close to the N-terminus and two N-glycosylation sites. The level of aminoacid similarity with other coronaviruses is very low and the best homology is with the small envelope protein of the transmissible gastroenteritis virus (TGV).

[1492] The matrix glycoprotein (M) is a 221-residue polypeptide with a predicted molecular weight of 25 kDa. Computer analysis predicts a topology consisting of a short aminoterminal ectodomain, three transmembrane segments and a carboxyl terminus located at the interior side of the viral envelope. In analogy with the matrix glycoprotein of TGV, that of the avian infective bronchitis virus (AIBV) and that of the hypervirulent MHV-2 strain the SARS M glycoprotein is N-glycosylated at the N-terminus. SARS M protein shows highest similarity to group 2 viruses (Table 11).

[1493] Finally, the nucleocapsid protein N is a 397-residue-long phosphoprotein that interacts with viral genomic RNA to form the nucleocapsid. The level of conservation with other coronaviruses is low, ranging from 26.9% identity with the HCoV-229E to 37.4% identity to the Bovine coronavirus (BcoV) (Table 11). Epitope analysis of the nucleocapsid protein has been carried out (Li et al. (2003) Geno Prot & Bioinfo 1:198-206) in which the epitope site at the C terminus of the protein was located as SEQ ID NO: 7394 (amino acids 371-407 of SEQ ID NO: 6052).

[1494] In addition to the above fundamental proteins, many viruses express a set of other peptides, which are generally dispensable for viability, but can influence the infectivity potential of the virus. (de Haan et al., Virology 2002; 296(1):177-189). These proteins are generally conserved within members of the same serogroup, but differ profoundly among the groups. For this reason, they are generally referred to as group-specific proteins (FIG. 11). Members of the group 1, represented here by HcoV-229E, have two group-specific genes located between the S and E genes and sometimes one or two ORFs downstream of the N gene, preceding the 3′ UTR region of the genome. Viruses of the group 2, with MHV as prototype, have two group-specific genes (2a and HE) between ORF1b and S, as well as other two between S and E genes. Finally, the group 3 viruses, represented by the prototype AIBV, have two group-specific genes between S and E and other two between the M and N genes.

[1495] With the exception of the hemagglutinin esterase HE, for which hemagglutinating and acetyl-esterase enzymatic activities have been demonstrated, all the other group-specific ORFs encode proteins whose role has not yet been established.

[1496] Interestingly, the arrangement of specific genes in the SARS genome is peculiar and the predicted ORFs do not display any significant homology with ORFs present in the other coronaviruses, nor with any other known protein from different organisms. Like viruses of the group 1 and 3, SARS lacks the HE hemagglutinin and does not contain ORFs between the ORF1b and the S gene. Furthermore, two predicted ORFs (ORF3 and ORF4) are encoded in the region between S and E, and superimpose for most of their length. ORF3 has an IG sequence 2 bp upstream of the ATG start codon. In contrast to the other groups, SARS contains five predicted ORFs in the region between M and N genes. ORF7 is located 10 bases downstream of the stop codon of M gene, and has an IG sequence 155 nucleotides upstream from the ATG start codon. Similarly, ORF8 and ORF10 present an IG right upstream of their ATG start codons. On the other hand, the 5′ ends of ORF9 and ORF11 shortly superimpose with the flanking genes, and for this reason they do not need an IG to activate transcription. ORF12 totally superimposes with the N gene and shares very low homology with a 22 kDa protein of the MHV virus, coded in the corresponding region.

[1497] Despite the absence of indications of possible localization and function deriving from sequence similarity, ORF3, ORF7 and ORF8 contain hydrophobic segments, suggesting association with membrane structures. In addition, ORF3, the longest among the SARS specific gene, is the only one that encodes for a peptide containing a high number of predicted O-glycosylation sites (Table 11). Predicted N-glycosylation sites have been identified in ORF3, ORF11 and ORF12.

[1498] Two shorter ORFs in the non-structural regions are SEQ ID NOS: 9965 and 9966. The invention includes polypeptides with these sequences, and also fragments, variants, etc.

Phylozenetic Analysis

[1499] The substitution frequency within 922 conserved bases from the pol gene of eleven coronaviruses from the three different serogroups has been used in the past to show that the variability within members of each serogroup is much smaller than between members of different serogroups, confirming the previously described serological groupings. (Stephensen et al., Virus Res 1999; 60(2):181-9). We used the 922 bp region of the pol gene of SARS and aligned it with the same fragment from other 12 coronaviruses. The tree obtained showed that the SARS virus is distinct from the other three groups of coronaviruses (FIG. 20). Similar results were obtained using the full-length aminoacid sequences of pol, 3CL-protease and helicase from the replicase region and those of the spike and the matrix glycoproteins from the structural region (data not shown). These data confirmed that the entire genome of the SARS virus clusters in a new group (group 4) of coronavirus.

[1500] To gain more resolution for possible evolutionary relationships we performed the analysis using consensus sequences of predicted domains of the proteins. In particular, we generated consensus sequences of the S1 domain of the spike protein from the group 1 and group 2 and then we compared them to the S1 domain of the SARS spike. No consensus could be generated from the group 3 since only the spike protein of AIBV is known. Interestingly, the tree constructed from the alignment of SARS SI with the consensus generated from the two groups of spike proteins was different from that in FIG. 20, and showed a much closer relationship between SARS and group 2 coronaviruses (FIG. 21A). Further analysis showed that 19 out of the 20 cysteines present in the SARS S 1 domain are spatially conserved with the group 2 consensus sequence, while only five are maintained either within the group 1 and group 3 sequences (FIG. 21B). Given the fundamental role played by cysteines in protein folding, it is likely that the S1 domain of SARS and group 2 coronaviruses share a similar spatial organization.

Seguence Variability Between SARS Coronaviruses

[1501] We compared the FRA sequence to the four complete SARS genomes available on the Web. A total of 30 mutations were detected. Nine of these mutations were silent while 21 resulted in aminoacid substitutions (Table 12). Within ORF1a, three silent and seven productive mutations were detected. In ORF1b, there were five silent and three productive mutations. One of the productive mutations was caused by two nucleotide substitutions resulting in a single aminoacid change. Five changes were located in the spike protein, four of these were productive and one silent. Two productive mutations were in ORF3 and in the matrix glycoprotein M. One productive mutation each was in ORF10 and in the nucleocapsid protein N.

[1502] The overall difference between FRA and TOR2 was of nine nucleotides resulting in two silent mutations and seven aminoacid changes. The difference between FRA and Urbani is 12 nucleotides, which result in five silent mutations and seven aninoacid changes. For CUHK 16 nucleotides were different, five of which were silent mutations. For FRA and HKU 14 nucleotide changes resulted in four silent and nine productive mutations.

### Example 2

### Production, Inactivation and Purification of Whole SARS Virus Using MCS Chromatography Resin Purification Followed by Density Gradient Ultracentrifugation

[1503] A SARS isolate FRAI (EMBL: AY310120) was passaged on VERO cells that were cultivated in DMEM (Gibco: Cat No. 21969-035, Lot No. 3078864), Penicillin/Strep (Gibco: Cat No. 15070-063, Lot No. 1120042), and 3% FCS (Gibco: Cat No. 10270-106, Lot No. 40F6130K) at 37° C., 5% CO₂. Trypsin (Gibco: Cat No. 25300-054, Lot No. 3078729) was used for detaching the cells.

[1504] For virus production the third passage was used for inoculation of VERO cells at a moi of ˜0.1. Cells were incubated with the virus for 1 h at 37° C. in infection medium (DMEM without PS, FCS); after 1 h cells were washed twice and further incubated at 37° C. for 48 h in the presents of 3% FCS and antibiotics. The supernatant was harvested 48 hours post infection (p.i.) and precleared by centrifugation at 3000 rpm at 4° C. for 10 min.

[1505] The SARS virus was inactivated by (β-propiolactone (BPL) treatment (1:2000) for 18 h at 4° C., followed by 3 h at 37° C. Testing the virus on successful inactivation, VERO cells were incubated with 10 ml BPL treated supernatant for 4 days at 37° C.; subsequentially, the supernatant was transferred to a fresh VERO cell culture and further incubated for another 4 days. Cells were checked for cytopathic effect (CPE).

[1506] 200 ml of the BPL-inactivated SARS virus harvest was then clarified using a 0.65 μm-pore-size filter (47 mm diameter) to pass virus particles and retain cell debris. The filter unit was connected to a Masterflex pump, which accomplished a consistent flow rate of 40 ml/min.

A. MCS Chromatography Purification Step

[1507] The filtered virus suspension was then subjected to MCS chromatography. The MCS column was prepared as follows. 27 ml slurry led to 14 ml sedimentated resin which Was packed using a Gotec Superformance Column (diameter 1.0 cm, height 15.7 cm, volume 12.33 ml). 1% of the column volume of a 1% acetone solution was injected to the column and the column was run with a flow of 100 cm/h. The HETP, N and A, values were then calculated as HETP: 0.056 cm, N/m: 1790 and Aₛ=1.20.

[1508] The amount of proteins in the purified solution after the MCS chromatography step were assessed with a bicinchoninic acid (BCA) method (Interchim) (see, e.g., http://www.piercenet.com/files/bca.pdj) and electrophoresis.

[1509] SDS-PAGE was done in accordance to Laemmli, Nature (1970) 227:680-685. Samples for SDS-PAGE were diluted to a protein concentration of 77 μg/ml. Different protein concentrations were loaded depending on the gel types used (10/12/15 Wells, Novex/Invitrogen):

| | Protein Concentration | | | | |
|---|---|---|---|---|---|
| Number of Wells | in the Dilution | Load | | Protein/Well | |
| 10 Wells | 77 μg/ml | 20 | μl | 1 | μg |
| 12 Wells | 77 μg/ml | 15-20 | μl | 0.75-1 | μg |
| 15 Wells | 77 μg/ml | 10 | μl | 0.5 | μg |

[1510] Samples for use in a reducing SDS-PAGE were prepared as, follows:

| | |
|---|---|
| | 26 μl sample or diluted sample |
| | +10 μl NuPage Sample Buffer (4×) SDS NP0003 |
| | +4 μl TCEP Bondbreaker Solution 77720 |
| | (1:2 in MilliQ water) |
| Final Volume: | 40 μl |

[1511] The samples were heated for 10 minutes at 70° C. or left at room temperature for 1 hour (leaving the samples at room temperature prevents the M protein of Corona Virus to coagulate/forming complexes), and then centrifuged for approximately one minute at 14,000 rpm in a table top centrifuge.

[1512] Markers for use on the gel were prepared as follows. Gel bands containing less than 1 μg of proteins were easily visualised with the silver staining procedure using the Silver Staining Kit Protein, Plus One Staining Protocol (Pharmacia Biotech).

[1513] Western blotting was performed as follows. A semi-dry blotting technique was used to transfer the proteins from the SDS gel to a nitrocellulose membrane. The transfer was performed with a current of 0.8 mA/cm² for 1 hour. A rabbit polyclonal antibody against SARS virus was used to perform the immuno probing using the Western Breeze, Novex Chromogenic Western Blot Immunodetection Kit (Novex/Invitrogen).

[1514] The chromatogram of the inactivated SARS MCS capture step is depicted in FIG. 27. To estimate purity, MCS chromatography fractions were analysed by silver staining on NuPage 10% or 4-12% Bis-Tris-Gel (Novex) under reduced conditions, heated for 10 minutes at 70° C. (FIG. 28). THe fractions were also analysed under the same conditions by western blot (FIG. 29) to estimate using PAK 11/03 SARS Cov 270603 neutralizing titer 1:512 (this antibody was used for this and subsequent western blots). Purity estimates are as follows:

| | Volume/ | [Protein]/ | Total Protein/ | Step Recovery |
|---|---|---|---|---|
| Sample | ml | μg/ml | mg | Protein/% |
| Corona Harvest | 100 | 2547.6 | 254.76 | 100 |
| After | 100 | 2440.3 | 244.03 | 95.8 |
| Filtration = | | | | |
| Load | | | | |
| Flow Through | 85 | 2321.4 | 197.32 | 77.5 |
| Wash | 49.32 | 468.5 | 23.11 | 9.1 |
| Peak 1 | 12.12 | 252.7 | 3.062 | 1.2 |
| Total Recovery | — | — | 464.4 | 86.5 |

B. Density Gradient Ultracentrifugation Step

[1515] The eluted SARS virus fraction was then subjected to density gradient ultracentrifugation with a swinging bucket rotor to further purify the inactivated virus. 3 ml of MCS peak fraction were loaded onto a linear gradient (15-60% sucrose; 17 ml 15% and 17 ml 60% sucrose in gradient mixer). The separation was performed with a Beckman SW 28 rotor at 20,000 rpm for 2 hours.

[1516] The content of sucrose and protein in the linear density gradient ultracentrifugation fractions are depicted in the following table, the graph in FIG. 30 and the estimation of purity in FIG. 31:

| Fraction | Fraction Size/ml | [Sucrose]/% | [Protein]/μg/ml |
|---|---|---|---|
| 1 | 2 | 61 | 96.12 |
| 2 | 2 | 59.4 | 98.62 |
| 3 | 2 | 57.5 | 87.63 |
| 4 | 2 | 54.5 | 86.91 |
| 5 | 2 | 50.5 | 79.9 |
| 6 | 2 | 47.2 | 74.3 |
| 7 | 2 | 43.7 | 68.05 |
| 8 | 2 | 40.2 | 60.43 |
| 9 | 2 | 37.2 | 57.38 |
| 10 | 2 | 34 | 53.12 |
| 11 | 2 | 30 | 50.63 |
| 12 | 2 | 25.7 | 35.02 |
| 13 | 2 | 22.4 | 35.33 |
| 14 | 2 | 19.5 | 39.25 |
| 15 | 2 | 15.5 | 69.79 |
| 16 | 2 | 8.5 | 169.03 |
| 17 | 2 | 8.5 | 128.96 |

[1517] The protein concentration of fraction 11 (FIG. 31 SDS-gel) was measured again against a standard curve prepared in 30% sucrose and lead to a protein concentration of 3.67 μg/ml (0.05 μg on the gel). The M protein appears to be missing in this preparation possibily due to sample treatment procedure (heated samples).

[1518] There may be discrepancies in the protein concentration measurements in Table 2 due to sucrose interface with this assay.

### Example 3

### Production, Inactivation and Purification of Whole SARS Virus Using MCS Chromatography Resin Purification Followed by Density Gradient Ultracentrifugation

[1519] Inactivated SARS virus was prepared as described in Example above.

A. MCS Chromatography Purification Step

[1520] In this example, 200 ml of inactivated SARS virus harvest were subjected to MCS chromatography. The chromatogram of the capture step of inactivated SARS virus purification with MCS is depicted in FIG. 32, the protein recovery in the following table and the estimation of purity in FIG. 33:

| | Volume/ | [Protein]/ | Total Protein/ | Step Recovery |
|---|---|---|---|---|
| Sample | ml | μg/ml | mg | Protein/% |
| Corona | 200 | 2239.2 | 447.83 | 100 |
| Virus Harvest | | | | |
| After | 200 | 2245.1 | 449.02 | 100.3 |
| Filtration = | | | | |
| Load | | | | |
| Flow Through | 185 | 2126.3 | 393.37 | 87.8 |
| Wash | 49.32 | 450.1 | 22.2 | 5.0 |
| Peak 1 | 4.43 | 1245.6 | 5.52 | 1.2 |
| Total Recovery | — | | 421.08 | 93.7 |

Density Gradient Ultracentrifugation Step

[1521] 3.5 ml of MCS peak fraction were then loaded onto a linear gradient (15-40% sucrose: 16 ml 15% and 16 ml 40% sucrose in gradient mixer). The separation was performed with a Beckman SW 28 rotor at 20,000 rpm for 2 hours.

[1522] The content of sucrose and protein in the linear density gradient ultracentrifugation fractions are depicted in the following table and the graph in FIG. 34:

| Tube | Fraction Size/ml | [Sucrose]/% | [Protein]/μg/ml |
|---|---|---|---|
| 1 | 2 | 40 | 45.86 |
| 2 | 2 | 39 | 45.68 |
| 3 | 2 | 37.5 | 44.14 |
| 4 | 2 | 35.5 | 37.82 |
| 5 | 2 | 33.5 | 34.48 |
| 6 | 2 | 31.5 | 31.76 |
| 7 | 2 | 30.5 | 29.49 |
| 8 | 2 | 28 | 30.87 |
| 9 | 2 | 25.5 | 31.7 |
| 10 | 2 | 23.5 | 26.74 |
| 11 | 2 | 21.75 | 23.58 |
| 12 | 2 | 20 | 35.33 |
| 13 | 2 | 18 | 96.38 |
| 14 | 2 | 14.5 | 523.79 |
| 15 | 2 | 8 | 941.97 |
| 16 | 2 | 8 | 696.7 |

[1523] Protein recovery is shown in the following table and the estimation of purity is shown in FIG. 35. Electron Micrograph pictures of density gradient fractions 8, 9 and 10 are shown in FIG. 36:

| | | Protein/ | Total | Step |
|---|---|---|---|---|
| Step | Volume/ml | μg/ml | Protein/mg | Protein % |
| Load | 3.5 ml | 1245.6 | 4359.6 | 100 |
| Bulk Protein Fractions | 3.5 ml | 720.8 | 4324.9 | 99.2 |
| Viral Peak Fraction | 8 ml | 29.7 | 237.6 | 5.5 |
| Total Recovery | | | 4562.5 | 104.7 |

### Example 4

### Mouse Immunization with Inactivated SARS Virus

[1524] Mice were immunized subcutaneously on days 0, 14, and 28 with 5 μg BPL-inactivated SARS-CoV particles (BPL-SARS-CoV), either alone or together with Alum or MF59 as adjuvants. Serum was collected on days 0 (pre-immunization), 13 (post 1st immunization), 28 (post 2nd), and 35 (1 week post 3rd immunization). Neutralizing antibodies were assessed for blocking SARS-CoV infection of Vero cells in vitro. After 3 immunizations, neutralization titers were in the range 1:100-1:1000, which are levels similar to those present in the serum of SARS convalescent patients. As shown in the following table, the non-adjuvanted vaccine induced neutralizing antibody after the third immunization, and potency of this vaccine was enhanced significantly by including the adjuvants, with neutralizing antibody appearing after then 2nd immunization and overall titers increasing after then 3rd immunization:

| | Neutralization Titer | | | |
|---|---|---|---|---|
| Immunogen | pre | post 1st | post 2nd | post 3rd |
| BPL-SARS-CoV + MF59 (5 μg) | <1:20 | <1:20 | 1:158 | 1:630 |
| BPL-SARS-CoV + Alum (5 μg) | <1:20 | <1:20 | 1:67 | 1:612 |
| BPL-SARS-CoV (5 μg) | <1:20 | <1:20 | <1:20 | 1:71 |
| PBS | <1:20 | <1:20 | <1:20 | <1:20 |

### Example 5

### Balb/cMouse Immunization with Inactivated SARS Virus

[1525] A Balb/c mouse model for SARS infection has been developed (Subbarao et al. (2004), J. Virol., 78:3572-77. In this model, Balb/c mice are inoculated intranasally with 10⁴ TCID₅₀ of virus. At 48 hours post-inoculation, a 2-log increase in the TCID₅₀ virus titer can be detected in the lungs of infected mice. While virus replication is readily detected, the mice do not show any SARS disease symptoms and spontaneously clear the virus one week after inoculation. A decrease in virus titer in previously-immunized animals as compared to control animals demonstrates a protective effect of the vaccine being evaluated.

[1526] In this example, four Balb/c mice per group are immunized three times with 5 μg BPL inactivated SARS-CoV (days 0, 14, 28) either alone or in combination with MF59 and challenged with 10⁴ TCID₅₀ of SARS-CoV on day 43. Two days following virus challenge the mice are euthanized and SARS-CoV is quantified from nasal turbinates (NT) and lungs and the mean virus titer for each mouse is measured. Control groups received PBS alone, or an influenza virus vaccine (FLU) with or without MF59 adjuvant. Data were as follows (see also FIG. 51), where four mice were tested per group and virus titers are expressed as log₁₀ TCID₅₀ per gram of tissue:

| | Virus replication | | Virus replication in nasal | |
|---|---|---|---|---|
| | in lungs of | | turbinates of | |
| | challenged mice | | challenged mice | |
| | # infected/ | Mean (± SE) | # infected/ | Mean (± SE) |
| Immunogen | # tested | virus titer | # tested | virus titer |
| PBS | 4/4 | 6.3 ± 0.3 | 3/4 | 2.8 ± 0.35 |
| MF-59 alone | 4/4 | 6.1 ± 0.13 | 3/4 | 3.0 ± 0.38 |
| FLU vaccine (5 μg) | 4/4 | 6.3 ± 0.07 | 3/4 | 2.9 ± 0.36 |
| FLU vaccine (5 μg) + MF-59 | 4/4 | 6.0 ± 0.19 | 4/4 | 3.0 ± 0.11 |
| BPL-SARS-CoV (5 μg) | 1/4 | 1.6 ± 0.13* | 0/4 | Not detected** |
| BPL-SARS-CoV (5 μg) + MF-59 | 0/4 | Not detected* | 0/4 | Not detected** |

Two-tailed Student's t-test, compared to PBS-immunized mice, showed:
*P < 0.00001 or
**P = 0.025

[1527] As shown, virus could not be detected in the BPL-SARS-CoV immunized mice. The lower limit of detection of infectious virus in a 10% w/v suspension of lung homogenate was 1.5 log₁₀TCID₅₀/gm, and in a 5% w/v suspension of nasal turbinates the limit was 1.8 log₁₀TCID₅₀/gm. Viral titers in the immunized mammals were thus below these threshold values.

[1528] Thus the inactivated SARS-CoV vaccine was very efficient at preventing virus infection, as only one of eight mice immunized with the vaccine, either with or without MF59 adjuvant, was infected. Similar protection was not observed in control groups of PBS diluent, MF59 adjuvant, or influenza virus vaccine with or without adjuvant.

[1529] Neutralization titers of sera taken from the animals in the challenge study were assessed at two weeks post-1st, one week post-2nd, and one week post-3rd immunization. Mice immunized with the vaccine with MF59 adjuvant had already developed a neutralization titer of 1:71 after the 2nd immunization, which increased to 1:588 after the 3rd immunization, whereas mice receiving the unadjuvanted vaccine did not have any neutralizing activity post-2nd and a neutralization titer of 1:64 post-3rd immunization. Sera from mice in each of the control groups did not show any neutralization activity. These data clearly demonstrate not only the ability of the inactivated SARS-CoV vaccine to induce protective levels of SARS neutralizing antibodies, but also a beneficial effect of formulating the vaccine with adjuvant for elevated neutralization titers.

### Example 6

### Preparation of OMV Comprising SARS Viral Antigens

[1530] E. coli were transfected with a plasmid of interest (encoding a SARS viral antigen). Single colonies harbouring the plasmid of interest were grown overnight at 37° C. in 20 ml of LB/Amp (100 μg/ml) liquid culture. Bacteria were diluted 1:30 in 1.0 L of fresh medium and grown at either 30° C. or 37° C. until the OD₅₅₀ reached 0.6-0.8. Expression of recombinant protein was induced with IPTG at a final concentration of 1.0 mM. After incubation for 3 hours, bacteria were harvested by centrifugation at 8 000×g for 15 minutes at 4° C. and resuspended in 20 ml of 20 mM Tris-HCl (pH 7.5) and complete protease inhibitors (Boehringer-Mannheim™). All subsequent procedures were performed at 4° C. or on ice.

[1531] Cells were disrupted by sonication using a Branson Sonifier 450 and centrifuged at 5 000×g for 20 min to sediment unbroken cells and inclusion bodies. The supernatant, containing membranes and cellular debris, was centrifuged at 50000 g (Beckman Ti50, 29 000 rpm) for 75 min, washed with 20 mM Bis-tris propane (pH 6.5), 1.0 M NaCl, 10% (v/v) glycerol and sedimented again at 50000 g for 75 minutes. The pellet was resuspended in 20 mM Tris-HCl (pH 7.5), 2.0% (v/v) Sarkosyl, complete protease inhibitor (1.0 mM EDTA, final concentration) and incubated for 20 minutes to dissolve inner membrane. Cellular debris was pelleted by centrifugation at 5000 g for 10 min and the supernatant centrifuged at 75000 g for 75 minutes (Beckman Ti50, 33000 rpm). Outer membrane vesicles were washed with 20 mM Tris-HCl (pH 7.5) and centrifuged at 75 000×g for 75 minutes or overnight. The OMV was finally resuspended in 500 μl of 20 mM Tris-HCl (pH 7.5), 10% v/v glycerol. Protein concentration was estimated by standard Bradford Assay (Bio-Rad), while protein concentration of inner membrane fraction was determined with the DC protein assay (Bio-Rad). Various fractions from the isolation procedure were assayed by SDS-PAGE.

### Example 7

### Immunogenicity, Dose and Route Schedule for Recombinant Spike Protein in Mice

[1532] The immunogenicity, route and dosing of the recombinant spike proteins of the invention in mice may be assessed using the below detailed protocol. Preferably, the administered antigen will elicit neutralizing antibody titers at least in the range of 1/100- 1/1000. Increasing doses of antigen can be tested in the range from 5 to 20 μg of recombinant Spike antigen alone or mixed with an equal volume of MF59-citrate, administered SC or IM to anesthetized mice in 100 μl of inoculum. Groups of BALB/c mice, 6 per treatment are primed at day 0 and boosted at day 14 and 28.

| Group | Treatment | Dose/Route | Sampling interval | Number of mice |
|---|---|---|---|---|
| 1-3 | Rec-Spike protein | 20, 10, 5 μg/SC | 7, 21, 35, 42 d | 6 per dose level |
| 4-6 | Rec-Spike protein | 20, 10, 5 μg/SC | 7 | 6 per dose level |
| 7-9 | Rec-Spike protein | 20, 10, 5 μg/IM | 7, 21, 35, 42 d | 6 per dose level |
| 10-12 | Rec-Spike protein | 20, 10, 5 μg/IM | 7 | 6 per dose level |
| 13-15 | Rec-Spike - MF59 | 20, 10, 5 μg/SC | 7, 21, 35, 42 d | 6 per dose level |
| 16-18 | Rec-Spike - MF59 | 20, 10, 5 μg/SC | 7 | 6 per dose level |
| 19-21 | Rec-Spike - MF59 | 20, 10, 5 μg/IM | 7, 21, 35, 42 d | 6 per dose level |
| 22-24 | Rec-Spike - MF59 | 20, 10, 5 μg/IM | 7 | 6 per dose level |
| 25 | MF59 | NA/SC | 7, 21, 35, 42 d | 6 + 6 (sac d 7 and 42) |
| 27 | MF59 | NA/IM | 7, 21, 35, 42 d | 6 + 6 (sac d 7 and 42) |
| 29 | Saline | NA/SC | 7, 21, 35, 42 d | 6 + 6 (sac d 7 and 42) |
| 31 | Saline | NA/IM | 7, 21, 35, 42 d | 6 + 6 (sac d 7 and 42) |

[1533] This protocol can also be used to assess the Th1/Th2 profile of the specific immune response elicited by the recombinant Spike protein. Neutralizing and Spike-specific antibody titers will be assessed at days 7, 21, and 35; IgG2a vs IgG1 isotype of the Spike-specific antibodies will be determined at days 21 and 35; in vitro proliferation of lymph node and splenic T cells against the recombinant Spike protein will be determined at days 7 and 42, respectively; IFN-γ and IL-4 production by splenic T cell against the recombinant Spike protein from SARS-CoV will be assessed at day 42. Peripheral blood will be collected at days 7, 21, 35; lymph nodes cells at day 7, and spleen cells at day 42. Neutralizing and Spike-specific antibody titers and isotypes will be determined by inhibition of SARS-CoV infection of Vero cells and by ELISA, respectively. Proliferation of lymph node and splenic cells will be determined by ³[H]-Thymidine uptake. Frequencies of splenic IFN-γ and IL-4 producing T lymphocytes, will be determined by ELISPOT and FACS.

### Example 8

### Immunogenicity, Dosing and Route Schedule for Spike Proteins in Rabbits

[1534] The immunogenicity, route and dosing of the recombinant spike proteins of the invention in rabbits may be assessed using the below detailed protocol. Increasing doses can be tested in the range from 5 to 40 μg of recombinant Spike antigen alone or mixed with an equal volume of MF59-citrate, administered SC or IM to anesthetized animals in 200 μl of inoculum. Groups of New Zealand white female rabbits, 10 per treatment, will be immunized as shown in the table 20 below. The animals will be primed at day 0 and boosted at days 14 and 28. Peripheral blood will be collected at days 7, 21, and 35. Neutralizing and Spike-specific antibody titers will be determined by inhibition of SARS-CoV infection of Vero cells and by ELISA, respectively.

| Group | Treatment | Dose/Route | Sampling interval | Number of rabbits |
|---|---|---|---|---|
| 1-4 | Full-length Spike protein | 40, 20, 10, 5 μg/SC | 7, 21, 35 d | 10 per dose level |
| 5-8 | Full-length Spike protein | 40, 20, 10, 5 μg/IM | 7, 21, 35 d | 10 per dose level |
| 9-12 | Truncated Spike protein | 40, 20, 10, 5 μg/SC | 7, 21, 35 d | 10 per dose level |
| 13-16 | Truncated Spike protein | 40, 20, 10, 5 μg/IM | 7, 21, 35 d | 10 per dose level |
| 17-20 | Full-length Spike protein - MF59 | 40, 20, 10, 5 μg/SC | 7, 21, 35 d | 10 per dose level |
| 21-24 | Full-length Spike protein - MF59 | 40, 20, 10, 5 μg/IM | 7, 21, 35 d | 10 per dose level |
| 25-28 | Truncated Spike protein - MF59 | 40, 20, 10, 5 μg/SC | 7, 21, 35 d | 10 per dose level |
| 29-32 | Truncated Spike protein - MF59 | 40, 20, 10, 5 μg/IM | 7, 21, 35 d | 10 per dose level |
| 33 | MF59 | NA/SC | 7, 21, 35 d | 10 |
| 34 | MF59 | NA/IM | 7, 21, 35 d | 10 |
| 35 | Saline | NA/SC | 7, 21, 35 d | 10 |
| 36 | Saline | NA/IM | 7, 21, 35 d | 10 |

### Example 9

### Immunogenicity and Dose Schedule for Recombinant Spike in Ferrets

[1535] The immunogenicity and dosing of the recombinant spike proteins of the invention in ferrets may be assessed using the below detailed protocol. Three groups of ferrets, 6 for treatment, will be immunized with recombinant SARS-CoV Spike protein from CHO cell lines, alone or mixed with an equal volume of MF59-citrate, administered SC to anesthetized animals in 200 μl of inoculum. The recombinant Spike protein vaccine will be tested at the dose eliciting the highest neutralizing antibody titers in mice at day 35 after the second boost. The animals will be primed at day 0 and boosted at day 14 and 28. Peripheral blood will be collected at days 7, 21, and 35. Neutralizing and Spike-specific antibodies titers will be determined by inhibition of SARS-CoV infection of Vero cells and by ELISA, respectively.

| | | | Sampling | Number |
|---|---|---|---|---|
| Groups | Treatment | Dose/Route | interval | of ferrets |
| 1 & 2 | Rec-Spike protein | Y μg or 2Y μg/SC | 7, 21, 35 d | 6 |
| 3 & 4 | Rec-Spike protein + | Y μg or 2Y μg/SC | 7, 21, 35 d | 6 |
| | MF59 | | | |
| 5 | Saline | NA/SC | 7, 21, 35 d | 6 |

[1536] The 3 groups of ferrets, 6 animals per group, used for the immunogenicity studies above can then be used to assess efficacy of the recombinant Spike protein in protecting vaccinated animals from infection and/or disease. Anestethized animals will be challenged two weks after the last boost intratracheally with 10⁶ median tissue culture infectious dose unit (TCID₅₀) of the SARS-CoV Utah strain. Infection by SARS-CoV will be assessed by taking nasal, faringeal and rectal swabs from animals for 20 days after challenge as described (12). The presence of SARS-CoV in sample materials will be assessed by RT-PCR and infection assay of Vero cells. Animals will be monitored for clinical signs of SARS disease by assessing sleeping time, temperature, respiratory symptoms, diarrhea, body weight and survival. Protection will be determined by the magnitude and duration of virus shedding and by duration and severity of disease symptoms and percentages of surviving animals.

### Example 10

### Expression of Spike Protein for Vaccination

[1537] The SARS-CoV Spike glycoprotein was expressed in both full-length and truncated forms, using the nSh and nShATC pCMVIII constructs described above, both with hexahistidine tags. The vector constructs were evaluated for expression 48 hr after transfection into 293 cells and COS7 cells. The full-length Spike protein (nSh) was detected by western blot only in cell lysate, but not in culture media (FIG. 52).

[1538] The majority of SARS-CoV full-length Spike protein was expressed in transiently-transfected COS7 cells as a high molecular glycoprotein which ran at 540 kDa in non-reducing gels (FIG. 53). The gp540 is heat labile as indicated by the complete dissociation into monomeric forms (gp170 & gp180) by boiling, but it was resistant to DTT treatment. These data suggest that the recombinant Spike protein is noncovalently associated into a homotrimer (gp540). The presence of Spike protein in homotrimeric association also was confirmed in inactivated, purified SARS-CoV virion particles. Analysis of virion proteins by western blot under the same condition used for the characterization of recombinant Spike protein generated essentially identical results (FIG. 54).

### Example 11

### Spike Protein Processing

[1539] In order to characterize Spike protein processing, BHK-21 cells were infected with alphavirus replicon particles expressing the SARS-CoV full-length Spike. At 6 hoursr post-infection with an MOI of 5, infected cells were labeled for 1 hr with L-[³⁵S]methionine/cysteine and chased for up to 4 hours. The [³⁵S]-labeled spike protein was immunoprecipitated by anti-SARS rabbit serum and digested with Endo-H. Both digested and undigested proteins were analyzed by SDS-PAGE (4% polyacrylamide). As shown in FIG. 55, the full-length spike protein is synthesized as an Endo-H sensitive high-mannose glycoprotein (gp170, an ER form) that undergoes modification to an Endo-H resistant glycoprotein with complex oligosaccharides (gp180, a Golgi form). The conversion of gp170 into the gp180 form takes place within 2 hours (FIG. 56).

### Example 12

### High-Level Protein Expression

[1540] To develop a system for rapid expression of protein antigens, DNA transfection of 293 (human embryonic kidney) cells was used, to obtain milligram quantities of recombinant antigen. The most common method for culturing and transfecting 293 cells is in static or monolayer cultures. These procedures were modified by performing large-scale transfection of 293 cells in suspension and expanding the transfected cells in suspension culture for production of secreted or intracellular proteins. Several initial experiments were performed at the 100-milliliter scale cultures to determine optimum conditions, such as number of cells, type of transfecting reagent (FuGENE 6, Lipitoid or RO-1538) and the ratio of DNA to transfection reagent. Based upon pilot experiments, FuGENE 6 was the best transfecting reagent.

[1541] The kinetics of gene expression was compared to other viral envelope glycoproteins, and the data suggest that stable protein expression peaks around 72 to 96 hours post-transfection, depending upon the gene of interest, and then significantly decreases thereafter. Thus, using the optimum conditions, the transfection process was scaled from 100 ml to 4 liters. The 4 liter culture can be used for rapidly producing 2-10 milligrams of protein antigens. To facilitate antigen purification and also maximize the yield and recovery of the purified protein, transfection conditions were optimized by using serum-free medium.

[1542] Bulk transfection procedure has been used for the expression of truncated and full-length Spike antigens. The kinetics of expression for truncated form of the spike protein is presented in FIG. 56A. Expression of the truncated form of Spike protein peaked around 48 hrs and was stable until 72 hrs, therefore the cultures were harvested at 72 hrs post transfection.

[1543] Collected media were concentrated 20X and used for purification of truncated Spike protein by a very simple purification strategy where the truncated form of the spike was captured on GNA lectin followed by DEAE and ceramic hydroxyapatite column chromatography. The purified protein was analyzed on SDS-PAGE by silver stain (FIG. 56B) and also by western blot (FIG. 56C). Early efforts were able to purify the truncated form of the spike protein with >95% purity and approximately 50% recovery. The molecular mass of the truncated form of the Spike protein is approximately 170-180 kDa.

[1544] Full-length Spike protein was expressed in 293 cells using the bulk transfection strategy. The expression data suggest that, like the truncated form, expression peaked around 48 hrs post-transfection and remained stable until 72 hrs. However, contrary to the truncated form and as expected, full-length protein is not secreted, but rather is retained within the cells, as shown by the absence of any signal in western blots of cell culture supernatants. The full-length form of the protein was purified from Triton X-100 detergent-extracted cells. Full-length Spike protein was then captured on GNA lectin, followed by hydroxyapatite and SP chromatography. The calculated molecular mass of full-length spike protein is approximately 600 kDa, which is close to the theoretical mass for the trimer.

### Example 13

### SARS Virus Seed Cultures

[1545] A SARS-CoV reference seed virus propagated only in certified Vero cells will be used for the generation of the Master and Working Virus Seeds under GMP. A clinical specimen from the respiratory tract of a patient infected by the SARS-CoV is inoculated onto documented VERO cells, with certified culture media. Culture media containing the virus are harvested at 4 days post-infection and designated Passage 1 (P1). A second round of virus propagation is again performed in certified VERO cells with certified media, by inoculation of 1 ml per T-75 flask of 100 times diluted P1 virus. Culture supernatant was harvested at 3 days post-infection and stored at −80° C. as a P2 reference stock virus, without plaque purification.

[1546] Cell banks of Vero cells for further production of SARS-CoV are prepared from specific cell subsets that have not been used since the emergence of transmissible spongiform enephalopathies (e.g. since 1980). A research cell bank of these cells has been prepared using specified New Zealand-origin fetal bovine serum. From this research cell bank, a Master Cell Bank (MCB) is made under GMP conditions and using only specified and well-controlled media and supplements. The cell bank will is tested for absence of adventitious agents according to applicable US, EU, and international guidelines (see Points To Consider “Characterization of cell lines used to produce biologicals”, FDA/CBER 7/1993; ICH Q5D Draft 6 “Cell substrates”, Oct. 23, 1996; CPMP/ICH/294/95 “Note for Guidance on Quality of Biotechnological Products: Derivation and Characterisation of Cell Substrates Used for Production of Biotechnological/Biological Products (Step 4, 16. Jul. 1997); WHO final draft “Requirements for use of animal cells as in vitro substrates for the production of biologicals” Jul. 3, 1997). Tumorigenicity and identity testing is also required for this cell bank.

[1547] The reference virus is plaque-purified and expanded in certified Vero cells in the absence of FCS in order to generate Master and Working Seeds. Another option to help ensure purity and facilitate the assessment of safety of the Master Seed is to subject the SARS-CoV to pelleting and resuspension in PBS. The virus suspension is made up to 60% (w/w) sucrose with crystalline sucrose, transferred to a centrifuge tube and overlayed with 50, 40, 30, and 20% (w/w) sucrose solutions in PBS. The gradient is centrifuged for 72 h and then fractionated. The virus-containing fraction is diluted and the virions re-pelleted by ultracentrifugation. RNA from the virus pellet is isolated and transfected into certified Vero cells whereby the “infectious” positive-strand RNA will lead to the production of infectious virus, which can be plaque-purified and expanded to generate alternative Master and Working Seeds from purified virus RNA.

[1548] Viral seeds are tested for the absence of adventitious agents (see e.g. 21 CFR Revised as of Apr. 1, 1994, §630.35 Test for safety) and for identity, using a highly-specific neutralizing antiserum prepared from an independent source. Safety testing of viral seeds for vaccine purposes is done routinely by service laboratories. Broad-spectrum PCR testing can be used as an addition and/or alternative for testing.

### Example 14

### Scale-Up of Virus Production and Inactivation

[1549] A protocol for the production, inactivation, and purification of inactivated SARS-CoV with sufficient structural integrity to elicit protective neutralizing antibody responses in animal models involves: Vero cells are infected with virus at an M.O.I. of 0.01 in the absence of FCS and antibiotics; culture medium is collected, cleared by centrifugation, and inactivated with BPL, followed by confirmatory testing for complete inactivation; the inactivated material is filtered, subjected to MCS-column purification, and further purified by sucrose gradient centrifugation.

[1550] Several modifications and improvements can be developed when adapting this basic protocol to a larger scale for commercial use. Firstly, the cell culture and infection process can be adapted to roller bottles, as an intermediate step to allow rapid production for preliminary trials within existing BSL 3+ facilities. Full commercial production will typically use a fermentation process in a closed system, but a roller bottle system can be achieved more rapidly. The roller bottles do offer a true suspension culture system for Vero cells, which gives various technical and safety advantages over microcarrier cultures. Suspension cultures can be grown to any desired fermentation scale without interfering with the closed system between cell passages, as no trypsinization is required.

[1551] To scale up the infection process in roller bottles to 30-50 liters per batch, the optimum M.O.I. and harvesting periods for selected media and culture conditions should first be determined. For the larger scale, methods for harvesting and handling larger volumes of highly infectious material safely should be used, and so cell separation via centrifugation should be replaced by a method such as filtration through single-use filter cartridges.

[1552] The MCS-chromatography and the gradient purification steps described above can readily be scaled to a batch volume of up to 50 liters. For larger volumes, however, and for increased purity, ultrafiltration and sterile filtration steps will be used. Nuclease treatment to remove host cell DNA will also be included.

### Example 15

### Large Scale Analytical Methods

[1553] Analytical methods for the SARS coronavirus include virus titration methods, immunological and physico-chemical methods to quantitate and characterize the purified antigen (ELISA, PAGE, western blots using specific antisera against purified whole virus, etc.). Other analytical tests include: fast yield testing via asymmetric field flow separation and laser particle detection and counting; Western blot using specific antisera against individual viral proteins; and tests for residual host cell DNA.

[1554] Residual DNA testing is generally done by hybridization e.g. using a limit test. Such testing is performed according to methods already established and validated for other cell lines. As an alternative, the Threshold™ method may be used.

[1555] For producing specific antibodies, recombinant protein expression of all the ORFs from the structural and non-structural gene regions of the SARS-CoV is used. The ORFs can be cloned and expressed in E. coli and, if necessary, also in eukaryotic vectors such as baculovirus. This can provide sufficient amounts of purified soluble protein to immunize mice and rabbits to produce polyclonal and monoclonal antibodies against SARS proteins and to set up specific ELISA assays. Different expression vectors can be tested to maximize the yield of recombinant protein in a soluble form e.g. different vectors, one containing sequences coding for six N-terminal histidine residues and another containing a Glutathione-S-transferase protein fused to the C-terminus of the SARS protein. The recombinant proteins can be purified by single step column chromatography on either Nickel chelating Sepharose or Glutathione-Sepharose 4B resin. These procedures are very rapid and generally produce protein of 60-90% purity, which is suitable for raising specific antisera (Pizza et al. (2000) Science 287:1816-20). Five mice and two rabbits for each recombinant protein can be immunized SC with 20 and 50 μg recombinant protein, respectively, given in IFA as adjuvant, at day 0, 14 and 28. Sera are collected at day 7, 21 and 35 to assess specific titers before euthanasia of the animals for collection of blood and removal of spleens.

[1556] For the detection of impurities (e.g. Vero cell derived proteins) in the vaccine preparation, rabbit serum reactive against Vero-derived proteins can be used. Such antisera are obtained by immunizing rabbits with at least 10 μg of Vero cell lysate with CFA/IFA. The sera can be verified for reactivity against Vero-derived proteins in western blots. For more specific antisera against specific relevant cell-derived proteins that tend to be co-purified with the virus, mock-infected cell culture harvest that have undergone the purification process can be prepared and used for immunizing rabbits.

[1557] Methods to determine neutralization titers of sera from immunized animals and humans can be developed, without the constraints of using infectious SARS-CoV in a BSL-3+ laboratory. One such strategy will be to use recombinant antigens, particularly Spike protein or Spike-derived epitopes, and to develop ELISA assays for measuring antibodies against the target protein. Suitable epitopes allow a correlation to be established between the ELISA values and virus neutralization assay values. This approach provides a faster and more efficient (higher-throughput) comparison of specific and protective antibody titers. This ELISA test is also the ideal tool to monitor specific antibodies in safety trials, where several hundred animal sera must be tested.

[1558] Another strategy is to combine structural elements from both the pathogenic SARS-CoV and the non-pathogenic coronavirus mouse hepatitis virus (MHV) to construct chimeric virus-like particles (VLPs) that can be labeled. The assay is based on fusion between octadecyl rhodamine (R18)-labeled VLPs and cells (Hoekstra et al. (1984) Biochemistry 23:5675-81). The method relies on the relief of fluorescence self-quenching of R18 incorporated into VLPs upon fusion with cellular membranes. Coronavirus VLPs have been shown to mimic native virions with respect to their appearance in the electron microscope (EM) and their biological activities. As they do not contain viral RNA, however, then they cannot cause a productive infection (Vennema et al. (1996) EMBO J 15:2020-2028). The VLP system can be used for the mouse hepatitis virus (MHV) strain A59 (MHV-A59) )Godeke et al. (2000) J Virol 74:1566-15) containing a chimeric S protein. The protein chimera, consisting of the ectodomain of the SARS-CoV and the transmembrane and endodomain (64 C-terminal amino acid residues) from the MHV spike protein, can be co-expressed with the MHV M (membrane) and E (envelope) protein in OST-7 cells )Godeke et al.). VLPs secreted in the supernatant are harvested, purified and labeled with octadecyl rhodamine (R18) (Hoekstra et al). A constant amount of VLPs is incubated with a serial dilution of sera at 37° C. for 1 hour in a 96-well plate. Subsequently, cells expressing the receptor for the SARS-CoV, the angiotensin-converting enzyme 2 (ACE2) (Li et al. (2003) Nature 426:450-54) is be added and the extent of fusion can be measured with a fluorescence spectrophotometer.

[1559] A final strategy to monitor the ability of sera to inhibit cell-cell fusion interactions between cells expressing the SARS-CoV S protein and a human cell line expressing the angiotensin-converting enzyme 2 (ACE2), a functional receptor for SARS-CoV (Li et al.). This reporter gene-based assay uses the fluorescent shift (green to blue) of the fluorogenic substrate CCF2/AM (AM=acetoxymethyl) upon cleavage by β-lactamase (Bla) as read-out for cell-cell fusion (Zlokarnik et al. (1998) Science 279:84-88). For this assay, a BHK-derived cell line, stably expressing Bla and the SARS-CoV S protein is generated. In addition, a human cell line expressing ACE2 on its surface is used. BHK cells, expressing the S protein on their surface and Bla in their cytosol are incubated with serial dilutions of the sera to be tested for 1 h at 37° C. The cell line expressing the ACE2 is loaded with 1 μM CCF2/AM for 1 h at 22° C., washed twice with PBS, and co-cultivated with the BHK cells. In case of cell-cell fusion, Bla cleaves the substrate, resulting in a green blue shift with excitation at 409 nm. Inhibition of fusion by sera thus provides a detectable change.

### Example 16

### Stabilisation of Inactivated SARS-CoV

[1560] Although the purified inactivated SARS-CoV vaccine is capable of inducing potent neutralizing antibody responses in animals, it is relatively instable and can benefit from formulation to increase stability for an acceptable period of time. Suitable formulation changes include the use of various buffer systems, pH ranges, stabilizing excipients (e.g. sugars and sugar alcohols, amino acids, etc.) etc.. Stability testing can be conducted in real-time at normal storage temperatures, or can be conducted in an accelerated manner by using elevated temperatures. Vaccine stability can thus be increased to approximately one year or longer. Lyophilized vaccine formulation can also be used to extend shelf-life, possibly with further additives for stability during lyophilisation.

### Example 17

### Dose and Schedule Optimization for Inactivated Virus

[1561] Animal models of SARS-CoV infection have been reported, including mice, ferrets and macaques. As mentioned in example 4 above, mice immunized with the BPL-SARS-CoV vaccine achieve neutralizing antibody titers in the range of 1:100-1:1000, similar to levels found in convalescent patients, and are 100% protected from infection with a challenge virus. While the mouse challenge model is limited only to infection but not disease, ferrets and macaques are useful models of the human SARS disease. Two to four days after inoculation with SARS-CoV, both ferrets and macaques have been found to shed infectious SARS-CoV particles from the throat, nose and pharynx, as demonstrated by RT-PCR and/or virus isolation on Vero cells. At approximately the same time, the infected animals became lethargic, show respiratory distress and eventually die. Histologically, SARS-CoV infection in these animals associates with pulmonary lesions of different severity, similar to those found in biopsied lung tissue and autopsy material from SARS patients. With the availability of these models, preclinical studies with vaccines can be performed initially in mice for immunogenicity readouts, while efficacy of optimal doses and schedules can be assessed in the ferret and macaque models.

[1562] Initial studies in mice are used to determine the optimal dose and schedule required to elicit the highest levels of neutralizing antibody, with titers at least in the range of 1/100- 1/1000. In parallel to the assessment of neutralizing activity, other features of the humoral immune response and cellular immune responses can be investigated. In particular sera from immunized mice can be assessed for the isotype (IgG1 vs. IgG2a) of the Spike-specific antibody response. Also, the frequencies of splenic CD4+ T cells producing IFN-γ and IL-4 in response to BPL-SARS-CoV particles will be assessed by ELISPOT and ELISA. These experiments can provide insight into the quality of the T cell response helping the priming of a protective antibody response.

[1563] Increasing vaccine doses can be tested (e.g. from 5 to 20 μg of BPL-SARS-CoV alone or mixed with an equal volume of MF59-citrate), administered SC to anesthetized mice in 100 μl of inoculum. Groups of BALB/c mice, 10 per treatment, are immunized, with priming at day 0 and boosting at days 14 and 28. Secondary endpoints compare the kinetics of neutralizing vs. Spike-specific antibody titers and assess the Th1/Th2 profile of the specific immune response, and so neutralizing and Spike-specific antibody titers are assessed at days 7, 21, 35, and at 2, 3, 4, and 5 months after priming. The IgG2a and IgG1 titers of Spike-specific antibodies are determined at days 21, 35, and at 2, 3, 4, and 5 months after priming. Proliferation and IFN-γ and IL-4 production by splenic T cells against recombinant Spike protein from SARS-CoV are assessed at day 42, and at the end of the 5th month. Peripheral blood is collected at days 7, 21, 35, and at 2, 3, 4, and 5 months after priming. Spleen cells will be obtained at day 42 and at the end of the 5th month. Neutralizing and Spike-specific antibody titers and isotypes are determined by inhibition of infection of Vero cells and by ELISA, respectively. Proliferation of splenic cells is determined by ³[H]-thymidine uptake. Frequencies of splenic IFN-γ and IL-4 producing CD4⁺ T lymphocytes is determined by ELISPOT and FACS analysis.

[1564] Based on mouse results, the BPL-SARS-CoV vaccine can be tested in ferrets for the induction of protective neutralizing antibody titers. Ferrets are immunized according to a similar schedule as the mice and at the dose that elicits the highest neutralizing antibody titers in mice at day 35 after the second boost. Three groups of ferrets, 6 per treatment, are immunized with BPL-SARS-CoV, alone or mixed with an equal volume of MF59-citrate, administered SC to anesthetized animals in 200 μl of inoculum. The animals are primed at day 0 and boosted at days 14 and 28. Peripheral blood is collected at days 7, 21, and 35. Neutralizing and Spike-specific antibodies titers are determined by inhibition of SARS-CoV infection of Vero cells and by ELISA, respectively. Each group of ferrets is used to assess efficacy of the BPL-SARS-CoV in protecting vaccinated animals from infection and/or disease. Anesthetized animals are challenged intratracheally, two weeks after the last boost, with 10⁶ median tissue culture infectious dose units (TCID₅₀) of the SARS-CoV CDC strain. Infection by SARS-CoV can be assessed by taking nasal, pharyngeal and rectal swabs from animals for 20 days after challenge (Martina et al. supra). The presence of SARS-CoV in sample materials can be assessed by RT-PCR and infection assay of Vero cells. Animals can be monitored for clinical signs of SARS disease by assessing sleeping time, temperature, respiratory symptoms, diarrhea, body weight and survival. Protection can be determined by the magnitude and duration of virus shedding, by duration and severity of disease symptoms, and by percentage of surviving animals. The formulation eliciting the highest neutralizing antibody titers at day 35 can then be tested against a two-fold higher dose of BPL-SARS-CoV given in the same formulation in the same regimen.

[1565] Additional studies can evaluate immunogenicity and efficacy of the candidate vaccine in non-human primates. Three groups of adult cynomolgus macaques, 4 per treatment, are immunized with BPL-SARS-CoV, alone or mixed with an equal volume of MF59-citrate, administered SC to anesthetized animals in 500 μl of inoculum. The BPL-SARS-CoV vaccine can be tested at the dose eliciting the highest neutralizing antibody titers in ferrets at day 35 after the second boost. The animals are primed at day 0 and boosted at 3 and 6 weeks. Peripheral blood is collected at weeks 1, 4, and 7. A secondary endpoint is to assess the Th1/Th2 profile of the specific immune response. Neutralizing and Spike-specific antibody titers and frequencies of peripheral blood CD4+ T cells producing IFN-γ and IL-4 in response to the recombinant SARS-CoV Spike protein is thus assessed at weeks 1, 4, and 7. Neutralizing and Spike-specific antibody titers can be determined by inhibition of SARS-CoV infection of Vero cells and by ELISA, respectively. Intracellular cytokine staining and FACS analysis will be used to quantify IFN-γ- and IL-4-producing CD4⁺ T cells. The macaques can also be used to assess efficacy of the BPL-SARS-CoV in protecting vaccinated animals from infection and/or disease. Anesthetized macaques can be challenged two weeks after the last boost with 10⁶ median tissue culture infectious dose unit (TCID₅₀) of the SARS-CoV CDC strain in a 5 ml volume. A few drops of the virus can also be administered on each of the conjunctiva, 0.5 ml in the nose and the remainder in the trachea. Infection by SARS-CoV can be assessed by taking nasal, pharyngeal, and rectal swabs, and feces from animals for 20 days after challenge (Fouchier et al. (20030 Nature 423:240). The presence of SARS-CoV in sample materials can be assessed by RT-PCR and infection assay of Vero cells. Animals can also be monitored for clinical signs of SARS disease by assessing sleeping time, temperature, respiratory symptoms, diarrhea, body weight and survival. Protection can be determined by the magnitude and duration of virus shedding, by duration and severity of disease symptoms, and by percentage of surviving animals.

Mice

| Group | Treatment | Dose/Route | Sampling interval | Number of mice |
|---|---|---|---|---|
| 1-3 | BPL-SARS-CoV | 20, 10, 5 μg/SC | 7, 21, 35 d; | 10 per dose level |
| | | | 2, 3, 4, 5 m; | |
| 4-6 | BPL-SARS-CoV | 20, 10, 5 μg/SC | 42 d | 10 per dose level |
| 7-9 | BPL-SARS-CoV MF59 | 20, 10, 5 μg/SC | 7, 21, 35 d; | 10 per dose level |
| | | | 2, 3, 4, 5 m; | |
| 10-12 | BPL-SARS-CoV MF59 | 20, 10, 5 μg/SC | 42 d | 10 per dose level |
| 13 | MF59 | NA/SC | 7, 21, 35 d; | 10 + 10 (sacrificed at |
| | | | 2, 3, 4, 5 m; | 42 d and end 5 m) |
| 14 | Saline | NA/SC | 7, 21, 35 d; | 10 + 10 (sacrificed at |
| | | | 2, 3, 4, 5 m; | 42 d and end 5 m) |

[1566] Ferrets

| | | | Sampling | |
|---|---|---|---|---|
| Group | Treatment | Route | interval | No. of ferrets |
| 1 | BPL-SARS-CoV | SC | 7, 21, 35 d | 6 |
| 2 | BPL-SARS-CoV-MF59 | SC | 7, 21, 35 d | 6 |
| 3 | Saline | SC | 7, 21, 35 d | 6 |

[1567] Macaques

| | | | | No. of |
|---|---|---|---|---|
| Group | Treatment | Route | Sampling interval | macaques |
| 1 | BPL-SARS-CoV | SC | 1, 4, 7 w | 4 |
| 2 | BPL-SARS-CoV - | SC | 1, 4, 7 w | 4 |
| | MF59 | | | |
| 3 | Saline | SC | 1, 4, 7 w | 4 |

### Example 18

### Human T Cell Responses

[1568] Asia prelude to initiation of clinical studies in humans, the reactivity of peripheral blood T lymphocytes from healthy donors with different HLA haplotypes can be assessed using the in vitro priming technique (Abrignani et al. (1990) Proc Natl Acad Sci USA 87:6136-40). The aim of this study is to have a first indication of the immune-dominant T cell epitopes in SARS-CoV proteins. Briefly PBMCs from 20 healthy donors with different HLA haplotypes will be cultured in medium containing 5% autologous serum, in the presence of different concentration of SARS-BPL-CoV particles in the range from 0.5 to 20 μg/ml. The expression of activation markers will be assessed after 24 and 48 hours. Frequencies of IFN-γ- and IL-4-producing T lymphocytes will be assessed after 12 h and after 15 days in culture, in the presence of 100 U/ml recombinant human IL-2. Activated and cytokines producing CD4 T lymphocytes will be sorted and eventually cloned as single cells using FACS technologies. The CD4+ T cell repertoire from human subjects with different HLA will be assessed by proliferation assays of the CD4+ T cell lines and clones against autologous EBV-transformed cell lines loaded with 15-mer overlapping peptides from the most relevant structural and non structural protein of the SARS-CoV.

[1569] When moving to actual human trials, safety and immune responses will be evaluated in healthy adults following intramuscular immunization with escalating doses of the BPL-inactivated SARS-CoV vaccine, with MF59 adjuvant being included or omitted depending on preclinical data. Three/four immunizations will be given at 0, 1, 6 months in the first cohort, and at 0, 1, 2, 6 months and 0, 2, 6 weeks in the second and third cohorts respectively. The trial will be observer blind and placebo controlled. Subjects will be randomized into each dose level. Immune response parameters to be measured will include serum neutralizing antibodies, ELISA antibodies and peripheral blood IFN-gamma-producing CD4+ T cells by intracellular cytokine staining.

| | Antigen | Administration | No. treated | No. subjects | Sampling |
|---|---|---|---|---|---|
| Group | dose (μg) | schedule | subjects | with placebo | interval |
| A1 | 10 | 0, 1, 6 months | 18 | 6 | 0, 1, 2, 6, 7 mos |
| A2 | 20 | 0, 1, 6 months | 18 | 6 | 0, 1, 2, 6, 7 mos |
| B1 | 10 | 0, 1, 2, 6 months | 18 | 12 | 0, 1, 2, 6, 7 mos |
| B2 | 20 | 0, 1, 2, 6 months | 18 | 12 | 0, 1, 2, 6, 7 mos |
| C1 | 10 | 0, 2, 6 weeks | 18 | 12 | 0, 2, 6, 10, 30 wks |
| C2 | 20 | 0, 2, 6 weeks | 18 | 12 | 0, 2, 6, 10, 30 wks |

### Example 19

### Selection of CHO Cell Lines for Spike Protein Expression

[1570] Methods for the derivation of Chinese Hamster Ovary (CHO) cell lines that stably express viral envelope glycoproteins that are conformationally intact, appropriately glycosylated and efficiently bind neutralizing antibodies are well established for HIV and HCV (Srivastava et al. (2002) J Virol 76:2835-47; Srivastava et al. (2003) J Virol 77:11244-259; Heile et al. (2000) J Virol 74:6885-92). The same techniques can be applied to SARS-CoV, to generate two different stable CHOK-1 cell lines producing either full-length or truncated SARS Spike proteins. The Spike proteins can be expressed using the constructs described herein, but without the hexa-His tags. These proteins can compared for their ability to produce neutralizing antibodies in immunized animals as well as for their expression levels in CHOK-1 cells.

[1571] A pCMV3 vector expressing Spike can be used for the derivation of stable CHOK-1 cell lines, containing the CMV enhancer/promoter, ampicillin resistance, and a fused DHFR and attenuated neomycin gene for selection purposes. Stable cell lines can produced using the neomycin selection system in CHOK-1 cells. Clones can be sequenced to verify the integrity of the insert, and transient transfections can be performed using Trans-LT1 polyamine transfection reagent (PanVera Corp., Madison, Wis.) to assess the expression level and also the integrity of the expressed protein by ELISA and western blot analysis.

[1572] Initial CHO cells will be selected to be free from TSE/BSE contaminants and risks according to relevant regulatory standards. To construct cell lines, procedures involve transfection, primary screening with selective medium, followed by subcloning to assure purity of cell lines. Cell supernatants can be assayed using an antigen capture ELISA to quantify expression levels at all stages of selection and amplification. For full-length Spike expression, methanol fixed cells can be screened for internal expression by immunofluorescent staining using a rabbit anti-SARS antibody. Successive measurements at the T75-flask stage of expansion canbe employed to assure stability of expression levels. The molecular mass and integrity of the expressed proteins can be checked by PAGE both under native and reducing and denaturing conditions, followed by immunoprobing.

[1573] The pCMV3 vectors expressing SARS-CoV Spike proteins in either full-length or truncated forms can be introduced into CHOK-1 cells using the Trans-LT-1 reagent and non-selective media. 24-48 hours post-transfection, depending on cell density, cells are split at a 1:5 ratio and the medium can be changed to selective media containing neomycin at 500 μg/ml. Any bovine serum used in these procedures will be from TSE-free sources that meet regulatory standards. Ten to fourteen days later, individual colonies can be picked and transferred to 96 well plates and cultured in complete non-selective medium. When approximately 80% of the wells are confluent, 24 hour supernatants can be screened by Spike capture ELISA. For initial expression of full length Spike protein, cells can be fixed with methanol and screened by immunofluorescent staining using a rabbit anti-SARS antibody. After low-expressing cell lines have been eliminated and there are fewer than 20-30 cell lines, capture ELISA and western blots can then be used to determine the expression level after cell lysis. A portion of each cell line can be pelleted, weighed and lysed in 1% Triton lysis buffer for determination of expression levels. Three to four clones producing the highest levels of spike protein in correct structure and conformation can be expanded to three-liter bioreactors and adapted to low serum suspension culture conditions for scale-up.

[1574] The antigen capture ELISA assay for the SARS spike protein can be performed using 96 well flat-bottom plates coated with 250 ng per well of purified immunoglobulin obtained from rabbit sera that were immunized with inactivated SARS virus. Supernatant or lysate samples are added and incubated for 2 hours at 37° C. Bound antigen is reacted against pooled SARS^{+ve} serum or high affinity monoclonal antibody either human or mouse against SARS spike protein and detected using appropriate species-specific peroxidase-conjugated second antibody. The plates are developed using TMB substrate (Pierce, Rockford, Ill.), read at a wavelength of 450 nm, and the concentration of protein per ml sample is derived from a standard curve (OD vs. protein concentration) based on serial dilutions of a known concentration of recombinant spike protein.

[1575] The immunoprobing analysis will also be performed following the standard methods described by Srivastava et al. (2002) supra. Briefly, 10-20 μl of the sample is analyzed on 4-20% SDS PAGE under non-reducing/denaturing conditions with mild heating. The proteins are then transferred onto nitrocellulose membranes and reacted against polyclonal anti-Spike rabbit serum, followed by anti-rabbit Ig conjugated to Alexa 688 (Molecular Probes, Oreg.). The blots are scanned using an infrared imaging system.

[1576] The highest expressing candidate cell lines will be screened for Spike protein expression and stability in small-scale (3 liter) perfusion bioreactors. The candidate clones will be further evaluated for level of expression as well as integrity of expressed protein, and subsequently tested for expression stability in the absence of selection. The selected clones also will be tested for maintenance of the DNA sequence integrity of the integrated SARS spike protein gene. To quickly monitor the expression levels in small flasks and in the three liter evaluation cultures, a lectin-based process (Gluvanthus Nivalis lectin) has been developed to isolate SARS spike protein to a degree of purity that allows semi-quantitation and characterization of the protein in CHO supernatant. Full-length Spike protein will be obtained from Triton X-100 detergent extracted cells and then captured on GNA lectin, followed by hydroxyapatite and SP chromatograph. Eluted protein is then characterized by: (1) polyacrylamide gel electrophoresis (PAGE) and Coomassie staining, (2) immunoprobing with anti-SARS rabbit sera, (3) structural characterization using size exclusion chromatography (SEC), as well as mass spec analysis using MALDI-TOF.

[1577] Productivity from the CHO cell line expressing SARS spike protein should be at least 2 mg/L and for full-length Spike protein will be 3 mg/100 gm of cells, at steady-state cell density. Yield from one 45 day, 2.5-liter bioreactor will be ˜1000 mg crude protein.

### Example 20

### Purification of Spike Protein for Human Vaccines

[1578] To purify SARS spike protein for the purpose of producing GMP grade material for human use, the following basic process is used, with all steps being performed at 2-8° C.: the starting material, concentrated CHO cell culture supernatant (20-30×) is thawed and filtered through a 0.45 μm membrane; this material is heavily contaminated proteins from culture, as well as DNA; the first purification step is affinity chromatography using Gluvanthus Nivalis (GNA), a lectin that preferentially recognizes terminal mannose containing carbohydrates; glycosylated proteins, including SARS spike protein are captured and non-glycosylated proteins, as well as DNA, do not bind to this column; the GNA column is followed by two chromatographic steps operated in the flow through mode; the anion exchanger, DEAE, and ceramic hydroxyapatite (cHAP); DEAE binds some contaminating supernatant proteins and DNA, whereas cHAP binds any contaminating serum proteins; full-length Spike protein is purified from the cell pellet; the cells are lysed with Triton X-100 and full-length Spike protein is then captured on GNA lectin, followed by hydroxyapatite and SP chromatography.

[1579] The purified SARS spike can be further treated to remove adventitious viruses: viral inactivation at pH 3.5 for 1 hour; the sample is then concentrated and diafiltered into a buffer at pH 4 and finally captured the purified protein using SP resin; the spike protein binds to this resin and many viruses flow through.

[1580] The spike protein is eluted, concentrated and diafiltered into formulation buffer. This formulated bulk product is then filtered through a DV50 viral removal membrane followed by filtration through a 0.2 μm membrane. The formulated bulk is filled into suitable containers e.g. into 3.0 ml vials, in a class 100 laminar flow hood.

[1581] In process testing at each step of the purification includes protein concentration, endotoxin (LAL), bioburden, and recovery.

[1582] Prior to human administration, a test for potency will evaluate the specific ability of the vaccine in an in vitro or in vivo test to effect a given response. The in vivo immunogenicity will be determined by dosing groups of 10 mice with various doses of the protein antigen. Sera will be analyzed for the presence of IgG antibodies using an ELISA. The criterion for passing will be based upon the number of vaccine treated animals that are seropositive compared to a reference standard. Other tests include General Safety, sterility, purity, identity of the vaccine (using an ELISA specific for Spike protein), and quantity & protein concentration (UV spectrophotometric absorbance procedure based on the molar absorbance of the aromatic amino acids).

[1583] Stability testing will be performed on the bulk drug substance and on the final container product. Bulk product will be evaluated at temperatures of −60° C. (recommended storage condition), 25±2° C. and 40±2° C. protected from light, at time points of 0, 3, 6, 9, 12 months. Final container product will be tested at temperatures of −60° C., and inverted at 5±3° C., 25±2° C., and 40±2° C. at time points of 0, 3, 6, 9, 12 months. Stability-indicating assays may include appearance, pH, protein content, SDS-PAGE, size exclusion HPLC, and container/closure integrity, performed on single samples of bulk and triplicate vials of final container material.

[1584] The protein purified in this way can be evaluated in mice, rabbits and ferrets as described in, and based on the results of, examples 4, 5, 8 and 9 above.

[1585] Initial experiments will be performed in mice to determine optimal dose and schedule of the GMP Spike protein required to elicit the highest levels of neutralizing antibody, with titers at least in the range of 1/100- 1/1000. Spike protein will be tested in the range from 5 to 40 μg, alone or mixed with an equal volume of MF59-citrate, to anesthetized mice in 100 μl of inoculum. Groups of BALB/c mice, 10 per treatment, will be immunized. The animals will be primed at day 0 and boosted at days 14 and 28. Secondary endpoints will be to compare the kinetics of neutralizing vs. Spike-specific antibody titers and to assess the Th1/Th2 profile of the specific immune response. Neutralizing and Spike-specific antibody titers will be assessed at days 7, 21, and 35 and at 2, 3, 4, and 5 months after priming; the IgG2a and IgG1 titers of Spike-specific antibodies will be determined at days 21 and 35, and at 2, 3, 4, and 5 months after priming; proliferation and IFN-γ and IL-4 production by splenic T cell against the recombinant Spike protein from SARS-CoV will be assessed at day 42 and at the end of the 5th month. Peripheral blood will be collected at days 7, 21, and 35 and at 2, 3, 4, and 5 months after priming; spleen cells at day 42 and at the end of the 5th month. Neutralizing and Spike-specific antibody titers and isotypes will be determined by inhibition of SARS-CoV infection of Vero cells and by ELISA, respectively. Proliferation of splenic cells will be determined by ³[H]-thymidine uptake. Frequencies of splenic IFN-γ and IL-4 producing CD4+ T lymphocytes, will be determined by ELISPOT and FACS analysis.

[1586] Next, the optimal dosing and schedule for recombinant Spike vaccine will be determined in ferrets. Based on the mouse results, the Spike vaccine eliciting the highest antibody neutralizing titers will be tested against a two-fold higher dose of recombinant Spike protein given in the same formulation. Three groups of ferrets, 6 per treatment, will be immunized SC under anesthesia with 200 μl of inoculum. The animals will be primed at day 0 and boosted at days 14 and 28. Peripheral blood will be collected at days 7, 21, and 35. Neutralizing and Spike-specific antibodies titers will be determined by inhibition of SARS-CoV infection of Vero cells and by ELISA, respectively. Similar to the previous ferret studies, each group of animals will be used to assess efficacy of the vaccine in protecting immunized animals from infection and/or disease.

[1587] Immunogenicity and efficacy of the candidate vaccine also will be evaluated in nonhuman primates. Three groups of adult cynomolgus macaques, 4 per treatment, will be immunized with recombinant SARS-CoV Spike protein, alone or mixed with an equal volume of MF59-citrate, administered SC to anesthetized animals in 500 μl of inoculum. The Spike protein vaccine will be tested at the dose eliciting the highest neutralizing antibody titers in ferrets at day 35. The animals will be primed at day 0 and boosted at 3 and 6 weeks. Peripheral blood will be collected at weeks 1, 4, and 7. A secondary endpoint will be to assess the Th1/Th2 profile of the specific immune response, as described above (neutralizing and Spike-specific antibody titers, frequencies of peripheral blood CD4+ T cells producing IFN-γ and IL-4 in response to the recombinant Spike protein, assessed at at weeks 1, 4, and 7).

[1588] Finally, human phase I, placebo-controlled, dose-escalation, safety/immunogenicity trials will be performed for the IM recombinant SARS vaccine with MF59 adjuvant. The trial will evaluate safety and immune responses in healthy adults following immunization with escalating doses of SARS recombinant vaccine with MF59 adjuvant, administered intramuscularly. Three/four immunizations will be given at 0, 1, 6 months. The trial will be observer blind and placebo controlled. Subjects will be randomized into each dose level. Immune response parameters to be measured include serum neutralizing antibodies, ELISA antibodies and peripheral blood IFN-γ-producing CD4+ T cells by intracellular cytokine staining:

| | Vaccine | | | No. of | |
|---|---|---|---|---|---|
| | Antigen | | No. of | subjects | |
| | dose | Administration | treated | with placebo | Sampling |
| Group | (μg) | schedule | subjects | (MF59) | interval |
| A1 | 50 | 0, 1, 6 months | 18 | 6 | 0, 1, 2, 6, 7 |
| | | | | | months |
| A2 | 100 | 0, 1, 6 months | 18 | 6 | 0, 1, 2, 6, 7 |
| | | | | | months |

### Example 21

### Comparison of Inactivated Virus and Purified Spike Protein

[1589] Immunogenicity and efficacy of the inactivated virus vaccine and the purified Spike protein can be compared in non-human primates. Three groups of adult cynomolgus macaques, 4 for treatment, will be immunized with recombinant SARS-CoV Spike protein from CHO cell lines or with BPL-SARS-COV, given in the dose and formulation eliciting the highest neutralizing antibody titers in previous immunogenicity challenge experiments, administered SC to anesthetized animals in 500 μl of inoculum. The animals will be primed at day 0 and boosted at 3 and 6 weeks. Peripheral blood will be collected at weeks 1, 4, 7. A secondary endpoint will be to assess the Th1/Th2 profile of the specific immune response, as described above.

| | | | Sampling | No. of |
|---|---|---|---|---|
| Group | Treatment | Dose/Route | interval | macaques |
| 1 | Rec-Spike protein + or − | Y μg/SC | 1, 4, 7 w | 4 |
| | MF59 | | | |
| 2 | BPL-SARS-CoV + or − | Y μg/SC | 1, 4, 7 w | 4 |
| | MF59 | | | |
| 3 | Saline | NA/SC | 1, 4, 7 w | 4 |

### Example 22

### Expression in Yeast

[1590] Yeast is a useful and inexpensive eukaryotic expression system. Yeast-expressed proteins are used in recombinant hepatitis B virus vaccines, and recombinant SARS antigens may also be expressed in yeast for vaccine purposes. Yeast-expression is also convenient for the production of antigens for preparing monoclonal and polyclonal antitobodies, or for use in serological assays.

[1591] The nucleocapsid protein (N) and two different versions of the spike glycoprotein (S) from SARS coronavirus FRA strain (AY310120) were cloned for expression in S. cerevisiae:

[1592] SARS N: aa 1-422 (coordinates 28120-29388 of AY310120 strain)—FIG. 65

[1593] SARS spike: aa 14-1195 (transmembrane domain and cytoplasmic tail deleted)—FIG. 66

[1594] SARS spike: aa 14-662 (S1 domain)

[1595] To make the S1 construct, a XhoI-NotI fragment of approximately 3733 bp encoding the full-length spike glycoprotein was the starting point. PCR was used to amplify the full-length gene in two pieces: XbaI-BlnI of 2440 bp and BlnI-SalI of 1306 bp. These fragments were subcloned into commercial vectors (Novagen): pT7Blue2 XbaI-BlnI (5′ end of spike glycoprotein) and pT7Blue2 BinI-SalI (3′ end of spike glycoprotein; FIG. 58), respectively. The following primers were used in the subsequent PCR reactions: Spk-1 (5′) SEQ ID NO: 9785; Spk-2 (5′) SEQ ID NO: 9786; Spk-3 (5′) SEQ ID NO: 9787; Spk-4 (5′) SEQ ID NO: 9788.

[1596] E. coli HBO101 competent cells were transformed with the PCR ligation product and plated on Luria agar plates, containing 100 μg/ml ampicillin. The desired clones were identified using miniscreen DNA analysis. After sequence verification and plasmid amplification of the desired subclones, it was desirable to eliminate the internal SalI site present in the XbaI-BlnI portion of the spike sequence in order to facilitate future cloning into the yeast expression vector (BamHI-SalI). Therefore, we prepared a CelII-MfeI vector from the pT7Blue2 XbaI-BlnI (5′ end Spike) subclone to eliminated a 143 bp sequence containing the SalI site. Kinased oligos DSI-6 (SEQ ID NOS: 9789-9794) were then ligated into the CelII-MfeI vector to replace the 143 bp that were removed to mutate the SalI site (no aa changes), creating pT7Blue2.XbaI-BlnIΔsal.

[1597] The 5′ XbaI-BlnI (from pT7Blue2.XbaI-BlnI ΔSal) and the 3′ BlnI-SalI (from pT7Blue2 BlnI-SalI) spike glycoprotein inserts were gel-purified and ligated them into the p893-1 XbaI-SalI vector (a vector derived from pLitmus 38 (New England Biolabs) with the alpha-factor leader sequence cloned into the BamHI-SalI sites of the MCS). The resulting full-length SARS Spike coding sequence was named p893-1.SARS Spike 1255 #9 (FIG. 58).

[1598] E. coli HB 101 competent cells were transformed with the oligo replacement ligation product and plated on Luria agar plates, containing 100 μg/ml ampicillin. The desired clones were identified using miniscreen DNA analysis. After sequence verification of the positive clones, pT7Blue2 Xba-Bln ΔSal was chosen for use as a template for PCR reactions to amplify the Spike S1 1967 bp Xba-Sal fragment. The fragment was then subcloned into the p893-1 Xba-Sal vector, sequence verified, and named it p893-1.Spike S1 #11 (FIG. 59).

[1599] In order to clone into the S.cerevisiae expression vector, pBS24.1, the 5′ end of the S1 sequence had to be modified from XbaI to HindIII to allow ligation with the 3′ HindIII end of the ADH2/GAPDH BamHI-HindIII promoter fragment. From pT7Blue2 Xba-BlnΔSal (described above) an AgeI-SaII 1943 bp fragment was gel-purified. This fragment was ligated along with a synthetic pair of HindIII-AgeI 30 bp kinased oligos (S1-1+S1-2 creating the necessary 5′ HindIII site) into the pSP72 HindIII-SalI commercial subcloning vector (named pSP72.SARS Spike S1 #2; FIG. 59). S1-1 had SEQ ID NO: 9795 and S1-2 has SEQ ID NO: 9796.

[1600] After sequence verification of the positive clone from miniscreen DNA analysis, the HindIII-SalI fragment was gel purified. The 1365 bp BamHI-HindIII ADH2/GAPDH promoter fragment was ligated along with the 1973 bp HindIII-SalI S1 fragment into the pBS24.1 BamHI-SalI vector creating the genetically engineered pd.SARS Spike S1 #2 expression plasmid (FIG. 60).

[1601] S. cerevisiae strain AD3 was transformed with pd.SARS Spike S1 #2 and single transformants were checked for expression after depletion of glucose in the medium. The recombinant protein was expressed at high levels in yeast, as detected by Coomassie blue staining. In particular, yeast cells were transformed with the SARS S1 expression plasmid using the Invitrogen S.c. EasyComp™ Transformation Kit. Expression in shown in FIG. 57.

[1602] To express Spike 1195 protein, which does not contain the trans-membrane (TM) region or cytoplasmic tail that are present in the full-length SARS construct, the following series of genetic manipulations was performed:

[1603] From pT7Blue2 BlnI-SalI #11 (described above) a BlnI-Dral 1056bp fragment was gel purified. This fragment was ligated with a synthetic pair of 68 bp DraI-SalI kinased oligos (DRS1+2; SEQ ID NOS: 9797 & 9798) into a pT7Blue2 BlnI-SalI vector (FIG. 61). E. coli HB101 competent cells were transformed with the oligo replacement ligation product and plated on Luria agar plates, containing 100 μg/ml ampicillin. The desired clones were identified using miniscreen DNA analysis. After sequence confirmation the clone was named pT7Blue2 BInI-Sal Spike 1195 #7. The 1126 bp BlnI-SalI fragment encoding the 3′ end of the Spike 1195 was gel purified (FIG. 61).

[1604] In order to generate the XbaI-SalI Spike 1195 fragment, the 3109bp XbaI-PciI fragment was isolated from the p893-1.SARS Spike 1255 #9 (described above) and a 457bp PciI-SalI fragment from pT7Blue2.SARS Spike 1195 #7 (described above). The two fragments were cloned into the p893-1 XbaI-SalI vector, creating the p893-1.SARS Spike 1195 #34 plasmid (FIG. 62).

[1605] To clone SARS Spike 1195 into the pBS24.1 Saccharomyces cerevisisae expression vector, it was necessary to modify the 5′ end of the SARS Spike 1195 from XbaI to HindIII, as done for the Spike S1 expression clone described above. To begin, the 2416 bp AgeI-BlnI fragment was isolated from p893-1.SARS Spike 1195 #34. This fragment was ligated with the synthetic HindIII-AgeI 30 bp oligos (described above to generate the S1 protein for expression in S. cerevisiae) into the pT7Blue2 HindIII-BlnI vector. E. coli HB101 competent cells were transformed with the oligo replacement ligation product and plated on Luria agar plates, containing 100 μg/ml ampicillin. The desired clones were identified using miniscreen DNA analysis. After sequence verification of the positive clone and plasmid amplification of pT7Blue2.SARS 1195 5′ HindIII-BlnI #10 (FIG. 63), we isolated a 402 bp HindIII-NcoI fragment and the 2044 bp NcoI-BlnI fragment (FIG. 63). It was necessary for the HindIII-BlnI isolation to be done in two steps to avoid cloning issues related to the internal HindIII site located at nucleotide number 1319 of the spike 1195 protein.

[1606] To assemble the BamHI-SalI expression cassette of Spike 1195 into the pBS24.1 vector E.coli HB101 competent cells were transformed with the the BamHI-HindIII (ADH2/GAPDH promoter), HindIII-NcoI 402bp fragment, NcoI-BlnI 2044 bp and the BInI-Sall 1126 bp fragments into the pBS24.1 BamHI-SalI vector. The samples were plated on Luria agar plates, containing 100 μg/ml ampicillin. The desired clone was identified using miniscreen DNA analysis, thus creating the genetically engineered pd.SARS Spike 1195 #10 (FIG. 64).

[1607] S.cerevisiae strain AD3 was transformed with pd.SARS Spike 1195 #10 and single transformants were checked for expression after depletion of glucose in the medium. The recombinant protein was detected by Coomassie blue staining. In particular, yeast cells were transformed with the SARS 1195 expression plasmid using the Invitrogen S.c. EasyComp™ Transformation Kit.

### Example 23

### Expression in Mammalian Cell Lines

[1608] cDNA fragments containing the S protein ORF of 1255 amino acids were amplified by RT-PCR from SARS viral RNA (Frankfurt isolate) grown in Vero cells. The amplified PCR fragments were cloned into pBlueScript vector, sequenced, and consensus spike sequence was assembled to create a full-length SARS spike clone, pBSnSh. In vitro transcription of pBSnSh followed by translation in a rabbit reticulocyte lysate resulted in the production of single polypeptide with an estimated molecular mass of ˜140 kDa.

[1609] The insert of this plasmid was recloned via XhoI and Not I into a mammlian expression vector pCMVIII (Srivastava et al. (2003) J. Virol. 77:11244-11259) to create a construct, nSh (FIG. 74A). A PCR fragment containing a spike protein of 1195 amino acid, which was deleted for transmembrane (TM) domain and cystein-rich cytoplasmic tail (Cy) was amplified and cloned pCMVIII vector to generate the contstruct nShATC (FIG. 74B). Both constructs were tagged with six histidine residues at the C-terminus in order to aid in their characterization. The Xho I/Not I fragment without a histidine tag also was subcloned into the alphavirus replicon vector backbone pVCRchim2.1 for use in the production of an alphavirus replicon particle chimera that expresses S protein. Production and characterization of the replication defective alphavirus vector particles was performed essentially as described previously (Perri et al. (2003) J. Virol. 77:10394-10403; Polo et al. (1999) PNAS USA. 96:4598-4603). The resultant alphavirus vector particles were named as VEE/SIN.

[1610] COS7 cells and BHK-21 cells were maintained in Dulbecco's modified Eagle's medium supplemented with 10% fetal bovine serum at 37° C. and 5% CO₂ in air. COS7 cells were transfected with expression plasmids (nSh, nShΔTC) using a transfection kit (TransIt-COS, Mirus) following the manufacturer's protocol. The cells were washed once with ice-cold PBS and lysed with 1× Lysis buffer (20 mM MOPS, 10 mM NaCl, 1.5 mM MgCl₂, and 1% Triton X-100) containing complete mini protease inhibitor (Roche). After a 30-min incubation on ice, the debris was cleared by centrifugation. The cleared lysate was either purified or used directly in western blotting.

[1611] To purify secreted spike proteins, medium from transfected cells was collected and subjected to centrifugation at 12,000 rpm for 10 min to remove cellular debris. The cleared medium was applied to a ConA-agarose column (Vector Lab). The column was washed extensively with 20 mM sodium phosphate buffer, and then the bound proteins were eluted with 1M methyl α-D-mannopyranoside (MMP), 1M NaCl in 20 mM sodium phosphate buffer. Column fractions containing SARS-CoV spike proteins were applied to MagneHis Protein purification system (Promega) following the protocol suggested by the manufacturer.

[1612] For western blot analysis, proteins were separated by 4-20% SDS-PAGE and then transferred electrophoretically to nitrocellulose membrane (Invitrogen). Membrane was blocked in blocking buffer (5% skim milk and 0.1% Tween 20 in PBS) and incubated with indicated antibody at room temperature for 1 hr, washed and probed with horseradish peroxidase (HRP)-conjugated secondary antibody (Biosource) followed by chemiluminescence (ECL system, Amersham) and exposed by X-ray films. The antibodies used were a mouse monoclonal anti-histidine antibody (anti-His•tag Mab, Novagen), a rabbit polyclonlal antipeptide antibody against SARS-CoV spike proten (SmPab, Abgent), or rabbit anti-SARS sera (2BE) obtained by immunization of rabbits with purified SARS-CoV virion. The latter has a cell culture neutralizing titer of 1/2,500. Unless stated otherwise, antibody was used at 1/1,000 for anti-histidine antibody and SmPab and 1/10,000 for anti-SARS rabbit sera.

[1613] Some spike proteins were treated with Peptide-N glycosidase F (PNGase F). Cell lysates were diluted in 0.5% SDS and 1% β-mercaptoethanol and denatured at 100° C. for 10 min. After 2-fold dilution with 1% NP-40 in 50 mM sodium phosphate (pH 7.5), the samples were treated with PNGase F (NEB) at 37° C. for 1 hr. Enzyme-treated samples were analyzed by 4-12% SDS-PAGE in reducing condition. For a partial digestion with the PNGase, the cell lysates were diluted with 50 mM sodium phosphate (pH 6.0) containing 0.75% Triton-X and treated with PNGase F (Calbiochem) at 37° C. for 3 hr. Enzyme-treated samples were analyzed by 4-20% SDS-PAGE in nonreducing condition.

[1614] Western blots of cells 48-hours after transfection are shown in FIG. 75. The S protein was detected in cell lysates as a doublet with estimated molecular weight of ˜170-180 kDa, when the lysate was boiled and analysed under reducing SDS-PAGE conditions (FIG. 75A, lane 3). This doublet appears to result from differential glycosylation of one polypeptide product since pre-treatment of the cell lysate with PNGase F reduced the doublet to a single species of ˜140 kDa (FIG. 75A, lane 4). This is the expected size predicted from the aa sequence for a full-length, intact polypeptide product. This experiment indicates that the full length SARS-CoV S is expressed in mammalian cells as a single, uncleaved polypeptide, but in two differentially glycosylated forms, gp170 and gp180 respectively. Unlike the two S glycoforms encoded by the full-length sequence, none of which were secreted, the SΔ protein product was detected both in cell lysates (FIG. 75A, lane 5) as well as in the cell culture medium (FIG. 75B, lane3) as a single species of 160 kDa.

[1615] In order to further characterize the intracellular processing of the S protein, and as described above, BHK21 cells were infected with defective alphavirus particles expressing the full-length S. At 6 hr post infection with a MOI of 5, infected cells were pulse labeled for 1 hr with L-[³⁵S] methionine/cysteine and chased for 2 or 4 hours. The [³⁵S]-labeled S protein was immuno-precipitated using the rabbit antiserum raised against inactivated, purified virus and then digested with Endo H. The Endo H treatment involved dilution with a sample buffer (50 mM sodium phosphate, 0.1% SDS, 50 mM DTT, pH 6.0) and boiling for 5 min. After denaturation, the samples were further diluted with 0.75% Triton-X 100 and treated with endoglycosidase H (Endo H) following manufacturer's protocol (Calbiochem) for 3 hr at 37° C. Enzyme-treated samples were added with gel loading buffer containing 0.1% SDS and DTT and analyzed by 8% SDS-PAGE.

[1616] Both digested and undigested proteins were boiled in SDS and analysed by reducing SDS-PAGE (FIG. 55). After a 1-hr pulse, the S protein was apparent as a single gp170 component that was Endo H sensitive (lanes 1 and 2). After a 2-hr chase, a new species (gp180) was present along with gp170 in approximately equal proportions (lane3). After a 4-hr chase, the gp180 species was the dominant S protein component (lane 5) that was now Endo H resistant (lanes 5 and 6). This data is consistent with gp170 being an ER-resident glycoprotein containing high mannose chains and with gp180 corresponding with a Golgi-processed glycoprotein containing Endo H-resistant complex oligosaccharides.

[1617] The Endo H sensitivity of the C-terminus deleted SΔ protein purified from cell culture media ws also tested. As shown in FIG. 76, the SΔ observed within cell lysates was found to be Endo H sensitive (lanes 1 and 2), while the secreted SΔ in cell culture media was Endo H resistant (lanes 3 and 4). This result is consistent with this glycoprotein being synthesized in an immature form in the ER prior to transfer to the Golgi where the complex carbohydrate is added and the protein then secreted.

[1618] As already described, the S protein expressed in COS7 cells was detected as a gp170/gp180 doublet in western blot analyses of cell lysates that were fully denatured by boiling in the presence of DTT. However, the majority of S protein was detected as a high molecular glycoprotein in the 440-669 kDa range when the same cell lysate was not heat-denatured prior to western blot analysis using SDS-PAGE (FIG. 77, lane 1). The ˜500 kDa species was resistant to 10 mM DTT treatment (lane 3) and not dissociated into the monomeric form unless the lysate was first heat-denatured at 100° C. (lane 4). In contrast, oligomeric form of a test protein (Thyroglobulin) of which quaternary structure is held by disulfide-linkage was converted into subunit form by the 10 mM DTT treatment. These data suggest that the ˜500 kDa oligomeric form of S protein is not disulfide-linked and is heat labile. To confirm the heat-sensitivity of the ˜500 kDa species of S protein, the heat-denaturation experiment was repeated but without DTT. As shown in FIG. 78, heat denaturation of 500 kDa protein at 100° C. alone was sufficient to convert it into gp170/180 monomeric forms (lane 4). Using a 80° C. heat-denaturation step, both the ˜500 kDa and monomeric forms were detectable in similar proportion (lane 3).

[1619] In order to investigate further whether this ˜500 kDa species represents an S protein oligomer in native conformation, comparative analyses with virion-derived S glycoprotein derived from Vero cell cultures was performed. The purified virions were solubilised in 1% SDS prior to Western blot analyses after SDS PAGE. The presence of the ˜500 kDa spike protein oligomer was confirmed in virion particles (FIG. 79, lane 1). In addition, heat denaturation of solubilised virions produced the same oligomer-to-monomer conversion as seen with the full-length recombinant S (lanes 2,3). The oligomeric nature of virion S was further analysed in a cross-linking experiment. Aliquots of inactivated virion from sucrose gradient fractions were treated with 10% SDS at 1% final concentration and diluted 2-fold with 0.2M Triethanolamine-HCl (pH 8, Sigma); Dimethyl suberimidate (DMS; Pierce Chemical Co.) was then added from a freshly prepared solution (10 mg/ml in 0.2M Triethanolamine-HCl) at 3.3 mg/ml final concentration. After 2 hr at room temperature, samples were concentrated with Centricon-30 and analyzed by silver staining after electrophoresis on a 4% polyacrylamide gel. Both untreated and DMS cross-linked virion proteins were heat-denatured, and the heat effect on the maintenance of oligomer structure was analysed by SDS-PAGE and silver staining (FIG. 80). In the absence of cross-linking, heat denaturation resulted in the replacement of the ˜500 kD spike protein species with the monomer species. In contrast, in the cross-linked proteins, the levels of the ˜500 kD and monomer species did not change significantly after heating. These data support the fact that the ˜500 kD protein is an oligomer of S monomer proteins that are bound non-covalently. After cross-linking and boiling, the ˜500 kDa species migrated as a somewhat slower diffuse form than the untreated form. This mobility shift is probably due to a structural change resulting from boiling. In addition, a minor protein species of ˜300 kD, which may represent a non-dissociated S dimer, could be seen.

[1620] To estimate more precisely the size of the recombinant ˜500 kDa S species expressed in COS7 cells, a COS7 cell lysate containing the S protein oligomer was fractionated using size-exclusion column chromatography. The major portion of the ˜500 kDa oligomer co-eluted with a 572 kDa marker protein. Taken together, these experiments suggest that the ˜500 kDa S species seen in COS7 cell lysates is probably a homotrimer of the S protein monomer.

[1621] The oligomeric status of the SΔ spike protein was also examined after expression in COS7 cells. As shown in FIG. 81, the recombinant SΔ proteins present in cell lysates were also detected in high molecular weight forms of ˜500 kDa range when the lysate was not heated prior to SDS-PAGE and Western blot analysis (lane 1). However, the efficiency of oligomerization by intracellular SΔ protein appears to be much less (<10%) compared to that of full-length S protein under the same western analysis conditions. A heat-sensitivity test on this ˜500 kDa protein showed that the SΔ oligomer was more heat labile than that of the full-length S oligomer, as demonstrated by the >90% conversion of all of the ˜500 kDa species into monomeric Sd forms at 80° C. (lane 2). Also (FIG. 82), the majority of the secreted SΔ protein was found in monomeric form with the ˜500 kDa species barely detectable (and only detectable when the protein was loaded in excess for Western analysis) (lane 1). At a temperature above 80° C., all secreted SΔ proteins were detected as monomers (lanes 2, 3).

[1622] The ˜500kDa protein is glycosylated, and the effect of deglycosylation on its antibody binding was investigated. The recombinant COS7 lysate was treated with PNGase F under non-denaturing condition (as described above) and analysed by western blot. As shown in FIG. 83, deglycosylation did not affect the binding of anti-histidine Mab antibody to the treated S oligomer (lanes 2,3). However, it compromised the reactivity with the rabbit antisera raised against purified virus (lane 6). This antiserum binds to virion-derived S in western blot analyses only when DTT is omitted from the sample for SDS-PAGE indicating that it recognizes primarily a discontinuous, conformational epitope(s). This antisera has also been shown to have a high-titer of viral neutralizing antibodies. Its lack of binding to deglycosylated, recombinant S suggests that the carbohydrate actively contributes to the higher order, native structure of the S polypeptide oligomer.

[1623] The difference between the recombinant S and SΔ protein is the presence or absence of the TM-and Cys-rich domains at the C-terminus. This difference predicts that full-length S would be found associated with the membrane fraction while Sd would be in the soluble fraction upon lysis of transfected cells. Therefore, nSh- or nShΔTC-transfected cells were lysed under hypotonic conditions and the soluble cytosol fraction was separated from the insoluble membrane fraction by centrifugation (FIG. 48). As shown in FIG. 84, the S protein was found in the membrane fraction (DF) both as a ˜500 kDa and 180/170 kDa species (lane 4) but was not detectable in the soluble cytosol fraction (AF) (lane 3). However, the truncated SΔ protein was found as a monomeric species (gp170) in both fractions (lanes 5,6). This indicates that the C-terminal TM and Cys-rich domains are required for the anchorage of the S protein to cell membrane.

[1624] The cellular location of the S and SΔ proteins in COS7 cells was analyzed by indirect immunofluorescence microscopy. At 48 hr post-transfection, cells were directly fixed with 2% paraformaldehyde without detergent for cell surface staining or treated with detergent followed by Cytofix/Cytoperm solution for intracellular staining. Fixed cells were then stained with rabbit anti-SARS sera (2BE) and FITC-conjugated antibody. The nSh-transfected cells showed foci of S protein indicative of Golgi-localisation (FIG. 85A), while the nShΔTC-transfected cells displayed a uniform distribution of SΔ protein throughout the cytoplasm indicative of ER localisation (FIG. 85B). While the complete S protein was also observed on the surface of transfected cells in unfixed cells (FIG. 85D), the SΔ was undetectable on the cell surface (FIG. 85E). These results indicate the role played by the TM-and Cys-rich domains in anchoring the S protein to the plasma membrane. Although the TM-region alone is likely responsible for membrane anchorage, the potential role played by the Cys-rich region remains to be determined.

[1625] The SARS recombinant full-length S protein is thus an N-linked glycoprotein with an estimated molecular weight of 170-180,000 kDa. Deglycosylation with PNGase F resulted in a polypeptide of the expected size for the uncleaved, encoded polypeptide (140 kDa). Both transient and stable expression of the full-length SARS-CoV S gene in a variety of mammalian cells, including COS7, 293, BHK21, and Huh7 cell lines, consistently produced a S protein doublet (gp170/180) as detected in western blot analyses. Pulse-chase analyses of transfected cells demonstrated that the SARS CoV S protein was initially synthesized as an Endo H sensitive gp170 species followed by the gradual appearance of an Endo H resistant gp180 form, presumably as a result of the addition of complex carbohydrate within the Golgi apparatus.

[1626] The recombinant S protein was not secreted into the cell culture medium unless the C-terminal 60 amino acids containing the TM-region and the Cys-rich tail were deleted.

[1627] The quaternary structure of the full-length recombinant S protein was investigated using cross-linking treatment, heat-denaturation, and size fractionation analyses. The results data are consistent with the recombinant S protein existing as a homotrimer of ˜500 kDa. Similar analyses of virion-derived S yielded the same results. Such a trimeric structure has been reported for other enveloped RNA viruses: the hemagglutinin HA of influenza virus, the E1-E2 heterodimer of alphaviruses and the G protein of vesicular stomatitis virus. Incubations under reducing conditions indicate that the SARS-CoV S trimeric structure is non-covalently associated, and is very stable. S oligomers present in the cell lysate were shown to be resistant to reduction by 10 mM DTT, detergent treatment with 1% SDS, and heat denaturation at up to 60° C. . Incubation at a temperature higher than >80° C. resulted in the dissociation of the trimeric complex as evidenced by the decrease in trimer with the concomitant increase in the monomer bands. The temperature-induced appearance of the high-mannosylated gp170 (ER monomer form) as well as the complex-glycosylated gp180 (Golgi monomer form) suggests that trimerization can occur before the transport of the monomer spike protein to the medial Golgi apparatus. This is consistent with other reports for TGEV, influenza virus HA, and vesicular stomatitis virus G proteins. With these proteins, trimerization was reported to take place before addition of complex oligosaccharides in the Golgi apparatus.

[1628] The C-terminally truncated form of S was found in the cell lysate in both oligomeric and monomeric forms at a frequency of 10% and 90%, respectively. The truncated protein secreted into medium was found fully glysosylated and it was essentially all in monomeric form. We conclude that the C-terminal 60 amino acids of the S glycoprotein contains a membrane anchor region that affects the efficiency of trimerization. In S protein trimerization, it is possible that the C-terminal region is required to initiate the event and the triple-stranded coiled coil structures in the S2 stalk domain provide further stabilizing force as seen in HA oligomer of influenza virus.

### Example 24

### CHO Cells for Spike Protein Expression

[1629] CHO cell lines that stably express either the full-length or truncated SARS-CoV spike proteins were prepared. Several stably transfected CHO cell lines were obtained, and FIG. 73 shows western blot data from a panel of representative clones.

### Example 25

### Expression in E.coli

[1630] All SARS-CoV ORFs (FIG. 17, Table 10) were cloned in the pET vector and expressed as C-terminal His-Tag fusion proteins in E. coli. The proteins smaller than 16 KD were also expressed as N-terminal GST (Glutathione S-transferase) fusion proteins using pGEX vector.

[1631] Nsp1 and Nsp2, the two SARS-CoV proteins with proteolytic activity, were not expressed as full length proteins due to toxicity in E. coli. The respective genes were instead cloned in different portions in order to separate the catalytic residues (Cys833/His994 for Nsp1; His41/Cys145 for Nsp2) in the resulting recombinant proteins: Nsp1A from nucleotides 2719-5214 of AY310120; Nsp1B from nucleotides 5218-7371; Nsp1C from nucleotide 7372-9984; Nsp2A from nucleotide 9985-10416; Nsp2B from nucleotide 10476-10902.

[1632] Nsp9 (SEQ ID NO: 9775) was divided into two portions: Nsp9A from nucleotide 13371-14756; Nsp9B from nucleotide 14757-16166.

[1633] Matrix (M), ORF3 and ORF7 contain respectively three, two and one transmembrane domains. These proteins were expressed as deletion proteins excluding the first 100 amino acids (M and ORF3) or the first 18 amino acids (ORF7) that include the hydrophobic regions.

[1634] The cloned sequences are shown in Table 26.

[1635] A two-step strategy was used to amplify the cloned sequences. In the first step, amplification of DNA fragments containing more than one gene or single gene used sequenced cDNA as template. Eleven cDNA sequences were amplified: (1) a fragment, named amplC1, including genes coding for protein E, protein M, orf 7-8-9-10; (2) a fragment, named amplC2, including genes coding for orf 3-4; (3) a fragment, named amplC5, including genes coding for proteins Nsp12 and Nsp13; (4) Nsp11gene; (5) P28 and P65 genes; (6) Nsp1B and Nsp1C genes portion; (7) a fragment, named amplC9, including genes coding for proteins Nsp2 and Nsp3; (8) a fragment, named amplNsp4-7, including genes coding for proteins Nsp4, Nsp5, Nsp6, Nsp7 and for amplification of Nsp9A gene portion; (9) Nsp 9B gene portion and Nsp10 gene; (10) a fragment, named amplCO, including genes coding for proteins Orf11, Nucleocapsid (N) and Orf12; (11) Nsp1A gene portion. The primers used in this first step are given in Table 27:

[1636] In the second step, amplification of single genes was performed using DNA fragments from the first amplification step as templates. The primers are shown in Table 28.

[1637] Of the proteins where expression was seen, it was either in inclusion bodies (insoluble) or in a soluble form. Purification proceeded on appropriate material. Table 29 shows the molecular weight of the expressed fragments of SARS-CoV ORFs, whether they were cloned (+ or −), whether the cloned fragment was seen to be expressed (+ or −) and the form of protein which was chosen for purification.

[1638] Where a protein was a soluble His-tagged product, a single colony was streaked and grown overnight at 37° C. on a LB/Amp (100 μg/ml) agar plate. An isolated colony from this plate was inoculated into 20 ml of LB/Amp (100 μg/ml) liquid medium and grown overnight at 37° C. with shaking. The overnight culture was diluted 1:30 into 1.0 L LB/Amp (100 μg/ml) liquid medium and allowed to grow at the optimal temperature (30 or 37° C.) until the OD550 nm reached 0.6-0.8. Expression of recombinant protein was induced by addition of IPTG (final concentration 1.0 mM) and the culture incubated for a further 3 hours. Bacteria were harvested by centrifugation at 8000×g for 15 min at 4° C. The bacterial pellet was resuspended in 10 ml of cold buffer A (300 mM NaCl, 50 mM phosphate buffer, 10 mM imidazole, pH 8.0). Cells were disrupted by sonication (or French Press) on ice four times for 30 sec at 40 W using a Branson sonifier 450 and centrifuged at 13 000× g for 30 min at 4° C. Supernatants were mixed with 150 μl Ni²⁺-resin (previously equilibrated with buffer A) and incubated at room temperature with gentle agitation for 30 min. The resin was Chelating Sepharose Fast Flow (Pharmacia), prepared according to the manufacturer's protocol. The batch-wise preparation was centrifuged at 700×g for 5 min at 4° C. and the supernatant discarded. The resin was washed twice (batch-wise) with 10 ml buffer A for 10 min, resuspended in 1.0 ml buffer A and loaded onto a disposable column. The resin continued to be washed with buffer A at 4° C. until the OD280nm of the flow-through reached 0.02-0.01. The resin was further washed with cold buffer B(300 mM NaCl, 50 mM phosphate buffer, 20 mM imidazole, pH 8.0) until the the OD280 nm of the flow-through reached 0.02-0.01. The His-fusion protein was eluted by addition of 700 μl of cold elution buffer C (300 mM NaCl, 50 mM phosphate buffer, 250 mM imidazole, pH 8.0) and fractions collected until the OD₂₈₀ₘₘ indicated all the recombinant protein was obtained. 20 μl aliquots of each elution fraction were analyzed by SDS-PAGE. Protein concentrations were estimated using the Bradford assay.

[1639] Where a protein was seen as an insoluble product, the inclusion bodies were purified as follows: homogenize cells (5 g wet weight) in 25 ml 0.1M Tris HCl pH 7, 1 mM EDTA, at 4° C. using an ultraturrax (10000 rpm); add 1.5 mg lysozyme per gram cells; mix shortly with an ultraturrax and incubate at 4° C. for 30′; use sonication or high-pressure homogenization to disrupt the cells; to digest DNA, add MgCl₂ to a final concentration of 3 mM and DNase to a final concentration of 10 ug/ml and incubate 30′ at 25° C. add 0.5 vol of 60 mM EDTA, 6% Triton x-100, 1.5M NaCl pH 7.0 to the solution, and incubate for 30′ at 4° C.; centrifugation at 31000 g for 10′ at 4° C.; re-suspend pellet in 40 ml of 0.1M Tris HCl pH 7.0, 20 mM EDTA using ultraturrax; centrifugation at 31000 g for 10′ a 4° C.; store the IB pellet at −20° C.

[1640] The results of expression are shown in FIGS. 86 to 105. Examples of purity and yield are given in Table 30.

### Example 26

### Retention of Critical Epitope on Truncated Spike Antigen

[1641] A human monoclonal antibody having neutralizing activity was tested in an ELISA assay for reactivity with the purified truncated Spike protein. Briefly, ELISA plates were coated with truncated form of the spike protein at a concentration of 1 μg/ml (100 μ/well) by incubating the plates overnight at 4° C. The plates were washed, non-specific binding sites were blocked and then different dilutions of the antibody were added and plates were incubated for 1 hour at room temperature. At the end of incubation, the plates were washed and bound antibody was detected by using anti-human IgG conjugated to horse radish peroxidase (HRP) and an appropriate substrate. The optical density of each well was recorded at 405 nm using an ELISA reader. The data are shown in FIG. 69 and clearly demonstrate that the neutralizing epitope recognized by the mAb is preserved and exposed on the recombinant truncated Spike protein.

### Example 27

### Different Spike Vaccines

[1642] Purified truncated spike protein was used to immunize mice and the level of binding antibodies induced against the truncated spike protein was determined by ELISA assay. Briefly a group of 10 mice were immunized with 3 μg of truncated spike protein adjuvanted in MF59 at 0, 4 and 8 weeks intervals. Sera samples were collected from these animals and assayed for antibodies induced by truncated spike protein in an ELISA assay. An additional group of 8 mice was immunized with 75 jig of DNA encoding the truncated form of the spike protein on PLG particles at 0, 4 and 13 weeks intervals, the sera were collected and analyzed as above for anti-spike antibodies as above

[1643] The profile of binding antibodies induced in each group was plotted as geometric mean titer (GMT). Compared to a plasmid DNA vaccine expressing truncated spike antigen and delivered using a PLG microparticle formulation, the purified truncated spike protein was significantly more potent for inducing strong antibody responses. Further comparison with the antibody responses induced by inactivated BPL-SARS-CoV (already shown protective) in the same mouse strain revealed that the magnitude of antibody responses induced by purified truncated spike protein and the inactivated virus vaccine are in the same range (FIG. 70).

[1644] The neutralization potential of antibodies induced by the recombinant truncated spike protein, or plasmid DNA expressing the same spike antigen, were also evaluated. The GMT values obtained in both groups are shown in FIG. 71. From these data, it appears that the purified protein is significantly more effective at inducing neutralizing antibody responses against the SARS-CoV spike. Furthermore, the neutralization titers typically induced by the purified truncated spike protein are comparable to neutralization titers induced by an inactivated SARS-CoV vaccine.

[1645] FIG. 72 shows a comparison of antibody binding levels (ELISA, X-axis) with neutralization titers (Y-axis). In general there is a very good correlation between the binding and neutralizing antibodies. The bottom-left grouping shows ratios 2 weeks post-3rd immunization with the DNA vaccine; the top-right grouping shows ratios 2 weeks post-2nd immunization with the protein vaccine. Both forms of vaccine show a consistent correlation.

[1646] In further experiments, the ability of a DNA vaccine to invoke an immune response in mice was studied. Mice were immunized with pCMV-nSdTC plasmid, either free or with PLG microparticles. Serum from the mice was then used as the staining antibody against cultured 293 cells that had been transfected with spike, either full-length or truncated. The cells were centrifuged prior to testing and the pellet was lysed. The antibody was tested against the culture supernatant and against the cell lysate. As shown in FIG. 112, the mouse serum was able to detect spike protein in the lysate of cells that expressed full-length spike and in the supernatant of cells that expressed the truncated spike protein. Results were comparable to the staining seen when using rabbit serum that had been obtained after immunization with whole killed virus. Thus anti-spike antibodies can be induced by the use of DNA vaccination.

### Example 28

### Expression Cassettes in pCMV

[1647] The sequence of plasmid pCMVKm2 is given as SEQ ID NO: 9923. Genes encoding the spike protein either in full-length form (pCMVKm2 SARS Spike nS; SEQ ID NO: 9921) or in its ΔTC form (pCMVKm2 SARS Spike nSΔTC; SEQ ID NO: 9922) were inserted into this basic vector.

[1648] Mice were immunized with these vectors, and with similar vectors encoding the N, M or E proteins. Vectors encoding the same proteins but with optimized codon usage were also prepared. Codons were optimized for efficient human expression starting from the FRA sequence (GenBank: AY310120). The optimized sequences are: N (SEQ ID NO: 9924); M (SEQ ID NO: 9925); E (SEQ ID NO: 9926).

[1649] After administration, expression of proteins could be detected by immunofluorescence in all cases. For example, FIG. 106 shows immunofluorescence (using anti-SARS rabbit serum) results after administration of the vector encoding optimsed N antigen, revealing high level expression. Mice receiving the control vector alone showed no fluorescence.

[1650] FIG. 107 compares immunofluorescence (using Abgent anti-M antibody) of the native M sequence (107A) or the codon-optimsed M sequence (107B). Similarly, FIG. 108 compares immunofluorescence (using Abgent anti-E antibody) of the native E sequence (108A) or the codon-optimsed E sequence (108B).

[1651] Four groups of mice (8 mice per group) were immunized with: (1) SARS nS Spike, nSdTC truncated Spike, and N proteins; (2) pCMV-SARS-nSdTC: DNA+DNA-PLG at weeks 0,4 and 13 wks; (3) CMV-nS: DNA+DNA-PLG+VEE/SIN Rep at 0, 4 and 9 wks; (4) VEE/SIN Rep-SARS-nS three times at 0, 4 and 13 wks. Sera from all groups recognized SARS nS and nSdTC proteins, and also showed virus binding and neutralization activity.

### Example 29

### Spike Protein Cleavage

[1652] To investigate the effect of proteolytic cleavage on SARS-CoV Spike protein, it was expressed in various forms in E.coli, including: (1) full-length S1-S2; (2) S1 alone; (3) HR1 heptad; and (4) HR2 heptad. The expressed proteins were used to raise immune rabbit sera, which were then used for visualizing western blots of Vero cells, either infected or not infected with SARS-CoV.

[1653] FIG. 109 shows a western blot using a 1:10000 dilution of antibody raised against either the S1 domain or the uncleaved S1-S2 domains. FIG. 110 shows a western blot using a 1:10000 dilution of antibody raised against each of the four proteins. The difference in antigen reactivity is readily apparent.

[1654] FIG. 111 shows similar data. Each serum was tested against four lanes, with those gour lanes being from left to right: (a) serum at 1:500 dilution, SARS-CoV-infected cells; (b) serum at 1:500 dilution, non-infected cells; (c) serum at 1:2500 dilution, SARS-CoV-infected cells; (d) serum at 1:2500 dilution, non-infected cells. Again, the difference in antigen reactivity is readily apparent.

[1655] FIGS. 109-111 show that the Spike protein exists in various forms in infected Vero cells, with sizes of approx. 75 kDa, 90 kDa, 180 kDa and >250 kDa. The Spike protein is cleaved (at least partially) either intracellulary or after release of the particles.

[1656] If enzymatic cleavage of the mouse hepatitis coronavirus spike protein is inhibited then cell-cell fusion (syncytia formation) is also inhibited, but virus-cell fusion is not (de Haan et al. (2004) J Virol). Syncytia are observed in vivo in the lungs of SARS-infected patients, but are not seen in Vero cell cultures of the SARS-CoV. Inhibition of Spike protein cleavage may thus be used to prevent syncytia formation and related pathology, even though viral infectivity may not be blocked.

### Example 30

### Purification of SARS Protease

[1657] Cells were grown at 37° C. to mid-log phase and induced with 0.2% L-arabinose. Cells were harvested by centrifugation, and the cells resuspended in lysis buffer (LB) containing 20 mM Tris pH 7.5, 500 mM NaCl, 5% glycerol V/V, 0.05% Triton X-100, 5 mM βME, 5 mM imidazole, and complete protease inhibitors (−)EDTA. Benzonase was added to a final concentration of 50 U/ml of lysate. Cells were then lysed using two passes through a pre-chilled microfluidizer. The lysate was clarified by high speed centrifugation at 44,000× g. Clarified lysate was applied to a prepared Pharmacia chelating FF column charged with nickel sulfate. After application of the lysate the column was washed with 5 column volumes of LB, followed by 5 column volumes of LB supplemented with 45 mM imidazole. The column was then eluted using LB supplemented with 250 mM imidazole. Purity of the isolated SARS protease was 50%. Fractions containing protease were pooled, adjusted to 5 mM EDTA, and then applied to a Superdex 200 gel filtration column equilibrated in 20 mM Tris pH 7.5, 150 mM NaCl, 5% V/V glycerol, 0.05% Triton X-100, and 5 mM DTT. Purity of the isolated SARS protease was 70%. Again, fractions containing the protease were pooled, and then stored at −80° C. until used. Activity assay, mass spectrometry and western blot analysis were used to positively identify the protein (FIG. 133). All steps were carried out with pre-chilled buffers, and kept at 4° C. for as much of the preparation as possible.

Western of SARS Protease Purification Fractions

[1658] Protocol: Briefly, protein concentration was based on Absorbance at 280 nm, and coomassie stained gel estimates of purity. Protein was run on a 4-20% gradient gel, and transferred to nitrocellulose. The blot was then blocked with 3% BSA, probed with Mouse IgG anti-pentaHis, and then probed with a secondary antibody to Mouse IgG conjugated with HRP. The blot was visualized using an ECL kit (Pharmacia Biotech). The results are shown in FIG. 133 where A is the sizing column pool loaded at 50, 100 and 200 ng of target protein and B is the immobilized metal affinity column pool loaded at 50, 100 and 200 ng of target protein.

### Example 31

### Continuous Fluorescence Resonance Energy Transfer (FRET) Enzyme Assay

[1659] The peptide containing EDANS, the fluorescence donor, and DABCYL, the fluorescence quencher (DABCYL-VNSTLQ ∇SGLRK-EDANS) was synthesized by Syn. Pep. (Dublin, Calif.). The peptide contains the cleavage site Gln-Ser in the middle. Meyers, G. et al. Handbook of Proteolytic Enzymes and Barrett, A et al., Academic Press, London, 1998, 726-728. The proteolytic activity of SARS protease was followed kinetically by measuring the level of formation of cleaved product that contains the fluorescence donor, SGLRK-EDANS using the Hitachi fluorometer (F-4500 FL Spec.) set at 340 nm excitation and 490 nm emission wave length. 5 μL of 5 mM peptide stock in DMSO solution was added to the reaction mixture, containing 295 μl of standard buffer (75 mM Tris-Hcl, 25 mM NaOAc, 25 mM Bis-Tris, 25 mM glycine, 5 mM EDTA, and 1 mM EDTA, pH 7.4) and 100 ul of buffer or 100 ul of 3.6 uM protease stock solution. The kinetic curve was followed for 6 minutes (the reaction was linear with R2 value of 0.998 (FIG. 134)). The formation of fluorescence (proteolytic reaction) is likely enzyme dependent, as concentration of enzyme was tripled three times as much fluorescence was formed in the 6 minutes time frame.

[1660] It will be understood that the invention has been described by way of example only and modifications may be made whilst remaining within the scope and spirit of the invention.

TABLE 1
US Patents and Published International Patent Applications

| Publication | | Publication |
|---|---|---|
| Number | Title | Date |
| US-3927216 | 1,2,4-Triazol E-3-Carboxamides For Inhibiting Virus Infections | Dec. 16, 1975 |
| US-4010269 | Antiviral Quinazoline Compositions And Methods Of Use | Mar. 1, 1977 |
| US-4065570 | Antiviral 5-(Substituted Benzal) Hydantoins | Dec. 27, 1977 |
| US-4089965 | Thiazolylphenylguanidines As Antirhinovirus Agents | May 16, 1978 |
| US-4122191 | Antirhinovirus Agents | Oct. 24, 1978 |
| US-4192895 | Antirhinovirus Agents | Mar. 11, 1980 |
| US-4254144 | Substituted Benzonitriles Having Antiviral Activity | Mar. 3, 1981 |
| US-4264617 | Antiviral 5-(Substituted Benzal) Hydantoins | Apr. 28, 1981 |
| US-4287188 | Purine Derivatives | Sep. 1, 1981 |
| US-4327088 | Phosphonooxy- Or Glycosyloxy-Substituted Acrylophenones, Compositions And Uses Thereof | Apr. 27, 1982 |
| US-4332820 | Substituted Benzonitriles Having Antiviral Activity | Jun. 1, 1982 |
| US-4349568 | Sulfur-Substituted Diphenyl Ethers Having Antiviral Activity | Sep. 14, 1982 |
| US-4352792 | 3-Alkoxyflavone Antiviral Agents | Oct. 5, 1982 |
| US-4371537 | Sulfur-Substituted Phenoxypyridines Having Antiviral Activity | Feb. 1, 1983 |
| US-4423053 | Derivatives Of 2-Amino-5-(O-Sulphamidophenyl)-1,3,4-Thiadiazol As Antiviral Agents And A | Dec. 27, 1983 |
| | Process For The Preparation Thereof | |
| US-4505929 | Sulfur-Substituted Diphenyl Ethers Having Antiviral Activity | Mar. 19, 1985 |
| US-4526897 | Hypertensive Isoindolin-2-Yl-Aminoimidazolines And Isoindolin-2-Yl-Guanidines | Jul. 2, 1985 |
| US-4558134 | Certain Phenoxy-Pyridine-Carbonitriles Having Antiviral Activity | Dec. 10, 1985 |
| US-4629729 | Endowed With Anti-Viral Activity 2-Alkylamino-4,6-Dihalo Pyrimidines | Dec. 16, 1986 |
| US-4636492 | Inhibition Of Viral Protease Activity By Peptide Halomethyl Ketones | Jan. 13, 1987 |
| US-4652552 | Tetrapeptide Methyl Ketone Inhibitors Of Viral Proteases | Mar. 24, 1987 |
| US-4724233 | Therapeutical Application Of Phosphonylmethoxyalkyl Adenines | Feb. 9, 1988 |
| US-4738984 | Antirhinovirus Agents | Apr. 19, 1988 |
| US-4847246 | Antiviral Compositions Derived From Fireflies And Their Methods Of Use | Jul. 11, 1989 |
| US-4855283 | Novel Pharmaceutically Active N-(2-Aminoacylamido-2-Deoxy-Hexosyl)-Amides, -Carbamates | Aug. 8, 1989 |
| | And -Ureas | |
| US-4885285 | Phosphorus Compounds, Processes For Their Manufacture, And Their Use | Dec. 5, 1989 |
| US-4956351 | Antiviral Pharmaceutical Compositions Containing Cyclodextrins | Sep. 11, 1990 |
| US-5001125 | Anti-Virally Active Pyridazinamines | Mar. 19, 1991 |
| US-5036072 | Antiviral Agent | Jul. 30, 1991 |
| US-5070090 | Antipicorpaviral Herterocyclic-Substituted Morpholinyl Alkylphenol Ethers | Dec. 3, 1991 |
| US-5100893 | Antipicornaviral Pyridazinamines | Mar. 31, 1992 |
| US-5112825 | Antirhinoviral Heteroamine-Substituted Pyridazines | May 12, 1992 |
| US-5157035 | Anti-Virally Active Pyridazinaniines | Oct. 20, 1992 |
| US-5240694 | Combined Antiviral And Antimediator Treatment Of Common Colds | Aug. 31, 1993 |
| US-5242924 | Tetrazolyl-(Phenoxy And Phenoxyalkyl)-Piperidinylpyridazines As Antiviral Agents | Sep. 7, 1993 |
| US-5278184 | Synthetic Derivatives Of Pyrrole And Pyrrolidine Suitable For The Therapy Of Infections Caused | Jan. 11, 1994 |
| | By Rhinoviruses | |
| US-5364865 | Phenoxy- And Phenoxyalkyl-Piperidines As Antiviral Agents | Nov. 15, 1994 |
| US-5453433 | Thiadiazoles And Antipicornaviral Compositions | Sep. 26, 1995 |
| US-5492689 | Combined Virustatic Antimediator (COVAM) Treatment Of Common Colds | Feb. 20, 1996 |
| US-5514679 | Therapeutic Phenoxyalklpyridazines And Intermediates Therefor | May 7, 1996 |
| US-5514692 | Substituted Quinoline Derivatives Useful As Antipiconaviral Agents | May 7, 1996 |
| US-5523312 | Antipicornaviral Agents | Jun. 4, 1996 |
| US-5545653 | Anti-Viral Compounds | Aug. 13, 1996 |
| US-5552420 | Therapeutic Phenoxyalkylazoles And Phenoxyalkylazines | Sep. 3, 1996 |
| US-5567719 | Thiadiazoles And Their Use As Antipicornaviral Agents | Oct. 22, 1996 |
| US-5580897 | 1,2-Dithiins Having Antifungal Activity | Dec. 3, 1996 |
| US-5618821 | Therapeutic Phenoxyalkylheterocycles | Apr. 8, 1997 |
| US-5618849 | Orally Active Antiviral Compounds | Apr. 8, 1997 |
| US-5648354 | 1,2-Dithiins Having Antifungal Activity | Jul. 15, 1997 |
| US-5650419 | Thiadiazoles And Their Use As Antipicornaviral Agents | Jul. 22, 1997 |
| US-5693661 | Anti-Viral Compounds | Dec. 2, 1997 |
| US-5721261 | Therapeutic Phenoxyalkylazoles And Phenoxyalkylazines | Feb. 24, 1998 |
| US-5725859 | Plant-Based Therapeutic Agent With Virustatic And Antiviral Effect | Mar. 10, 1998 |
| US-5750527 | Thiadiazoles And Their Use As Antipicornaviral Agents | May 12, 1998 |
| US-5750551 | Treatment For Viral Diseases | May 12, 1998 |
| US-5762940 | Methods And Compositions For Inhibiting Or Destroying Viruses Or Retroviruses | Jun. 9, 1998 |
| US-5763461 | Therapeutic Phenoxyalkylheterocycles | Jun. 9, 1998 |
| US-5821242 | Anti-Viral Compounds | Oct. 13, 1998 |
| US-5821257 | Thiadiazoles And Their Uses As Antipicornaviral Agents | Oct. 13, 1998 |
| US-5821331 | Anti-Picornaviral Agents | Oct. 13, 1998 |
| US-5846986 | Therapeutic Phenoxyalkylazoles And Phenoxyalkylazines | Dec. 8, 1998 |
| US-5856530 | Antipicornaviral Compounds And Methods For Their Use And Preparation | Jan. 5, 1999 |
| US-5891874 | Anti-Viral Compound | Apr. 6, 1999 |
| US-5962487 | Antipicornaviral Compounds And Methods For Their Use And Preparation | Oct. 5, 1999 |
| US-6004933 | Cysteine Protease Inhibitors | Dec. 21, 1999 |
| US-6020371 | Antipicornaviral Compounds Compositions Containing Them And Methods For Their Use | Feb. 1, 2000 |
| US-6087374 | Anti-Viral Compounds | Jul. 11, 2000 |
| US-6114327 | Anti-Viral Compounds | Sep. 5, 2000 |
| US-6117844 | Method And Composition For Antiviral Therapy | Sep. 12, 2000 |
| US-6194447 | Bis (Benzimidazole) Derivatives Serving As Potassium Blocking Agents | Feb. 27, 2001 |
| US-6214799 | Antipicornaviral Compounds And Methods For Their Use And Preparation | Apr. 10, 2001 |
| US-6277891 | Nitric Oxide Inhibits Rhinovirus Infection | Aug. 21, 2001 |
| US-6294186 | Antimicrobial Compositions Comprising A Benzoic Acid Analog And A Metal Salt | Sep. 25, 2001 |
| US-6331554 | Antipicornaviral Compounds, Compositions Containing Them, And Methods For Their Use | Dec. 18, 2001 |
| US-6358971 | Anti-Viral Compounds | Mar. 19, 2002 |
| US-6362166 | Antipicornaviral Compounds And Methods For Their Use And Preparation | Mar. 26, 2002 |
| US-6414004 | 3-Substituted 5-Aryl-4-Isoxazolecarbonitriles Having Antiviral Activity | Jul. 2, 2002 |
| US-6420591 | Carbamates And Compositions Thereof, And Methods For Their Use For Treating Cancer, | Jul. 16, 2002 |
| | Inflammation, Or A Viral Infection | |
| US-6469018 | Compounds | Oct. 22, 2002 |
| US-6498178 | Inhibitors Of IMPDH Enzyme | Dec. 24, 2002 |
| US-6514997 | Antipicornaviral Compounds And Compositions, Their Pharmaceutical Uses, And Materials For | Feb. 4, 2003 |
| | Their Synthesis | |
| US-6525043 | Use Of Ion Channel Modulating Agents | Feb. 25, 2003 |
| US-6531452 | Antipicornaviral Compounds And Compositions, Their Pharmaceutical Uses, And Materials For | Mar. 11, 2003 |
| | Their Synthesis | |
| US-6534489 | Organophosphorus Compounds And The Use Thereof | Mar. 18, 2003 |
| WO 00/06529 | Diketoacid-Derivatives As Inhibitors Of Polymerases | Feb. 10, 2000 |
| WO 00/25791 | Pyridin-4-Yl Or Pyrimidin-4-Yl Substituted Pyrazines | May 11, 2000 |
| WO 00/27423 | Methods And Compositions For Treating Common Cold Symptoms | May 18, 2000 |
| WO 00/34308 | Protein Transduction System And Methods Of Use Thereof | Jun. 15, 2000 |
| WO 00/39348 | Methods And Compositions For Identifying Protease Modulators | Jul. 6, 2000 |
| WO 00/40243 | Novel Compounds | Jul. 13, 2000 |
| WO 00/50037 | Nitrosated And Nitrosylated Proton Pump Inhibitors, Compositions And Methods Of Use | Aug. 31, 2000 |
| WO 00/56331 | Inhibitors Of Impdh Enzyme | Sep. 28, 2000 |
| WO 00/56757 | Immunomodulatory Steroids, In Particular The Hemihydrate Of 16.Alpha.-Bromoepiandrosterone | Sep. 28, 2000 |
| WO 00/66096 | New Indication For Use Of Antiepileptic Agents And Medicines | Nov. 9, 2000 |
| WO 00/78746 | Antiviral Agents | Dec. 28, 2000 |
| WO 01/00199 | Compounds Obtained From Salvia Species Having Antiviral Activity | Jan. 4, 2001 |
| WO 01/00585 | Pyrazolidinol Compounds | Jan. 4, 2001 |
| WO 01/02551 | Virus Like Particles, Their Preparation And Their Use Preferably In Pharmaceutical Screening | Jan. 11, 2001 |
| | And Functional Genomics | |
| WO 01/03681 | Use Of Flavones, Coumarins And Related Compounds To Treat Infections | Jan. 18, 2001 |
| WO 01/05396 | Use Of Cobalt Chelates For Treating Or Preventing Virus Infection | Jan. 25, 2001 |
| WO 01/10894 | Antipicornaviral Compounds And Compositions, Their Pharmaceutical Uses, And Materials For | Feb. 15, 2001 |
| | Their Synthesis | |
| WO 01/19322 | Use Of Csaids In Rhinovirus Infection | Mar. 22, 2001 |
| WO 01/19822 | Antiviral Agents | Mar. 22, 2001 |
| WO 01/22920 | Colon And Colon Cancer Associated Polynucleotides And Polypeptides | Apr. 5, 2001 |
| WO 01/25188 | Novel Carbamates And Ureas | Apr. 12, 2001 |
| WO 01/31016 | Processed Human Chemokines Phc-1 And Phc-2 | May 3, 2001 |
| WO 01/37837 | 3,4-Dihydro-(1h)-Quinazolin-2-Ones And Their Use As Csbp/P38 Kinase Inhibitors | May 31, 2001 |
| WO 01/38312 | 3,4-Dihydro-(1h)Quinazolin-2-One Compounds As Csbp/P38 Kinase Inhibitors | May 31, 2001 |
| WO 01/38313 | 3,4-Dihydro-(1h)Quinazolin-2-One Compounds As Csbp/P39 Kinase Inhibitors | May 31, 2001 |
| WO 01/38314 | 3,4-Dihydro-(1h)Quinazolin-2-One Compounds As Csbp/P38 Kinase Inhibitors | May 31, 2001 |
| WO 01/40189 | Antipicornaviral Compounds And Compositions, Their Pharmaceutical Uses, And Materials For | Jun. 7, 2001 |
| | Their Synthesis | |
| WO 01/49303 | Multivalent Electron Active Compositions And Methods Of Making And Using Same | Jul. 12, 2001 |
| WO 01/60393 | Selective Destruction Of Cells Infected With Human Immunodeficiency Virus | Aug. 23, 2001 |
| WO 01/62726 | 2-Oxo-1-Pyrrolidine Derivatives, Processes For Preparing Them And Their Uses | Aug. 30, 2001 |
| WO 01/79167 | Antipicornaviral Compounds And Compositions, Their Pharmaceutical Uses, And Materials For | Oct. 25, 2001 |
| | Their Synthesis | |
| WO 01/90047 | Novel Mmp-2/Mmp-9 Inhibitors | Nov. 29, 2001 |
| WO 01/90129 | Prophylactic And Therapeutic Treatment Of Infectious And Other Diseases With Mono- And | Nov. 29, 2001 |
| | Disaccharide-Based Compounds | |
| WO 01/92499 | Nucleic Acid Molecules Encoding A Protein Interacting With Ser/Thr Kinase Akt | Dec. 6, 2001 |
| WO 01/93883 | Therapeutic Agents - Iii | Dec. 13, 2001 |
| WO 01/93884 | Therapeutic Agents - I | Dec. 13, 2001 |
| WO 01/93885 | Therapeutic Agents - Ii | Dec. 13, 2001 |
| WO 01/96297 | Antipicornaviral Compounds And Compositions, Their Pharmaceutical Uses, And Materials For | Dec. 20, 2001 |
| | Their Synthesis | |
| WO 02/04413 | Chiral Integrin Modulators And Methods Of Use Thereof | Jan. 17, 2002 |
| WO 02/11743 | Treatment Of Prostate Cancer | Feb. 14, 2002 |
| WO 02/12477 | Enhanced Replication Of Hcv Rna | Feb. 14, 2002 |
| WO 02/14343 | Immunosuppressive, Antiinflammatory And Analgetic Compounds | Feb. 21, 2002 |
| WO 02/24145 | Antiviral Substances From Plant Cuticular And Epicuticular Material | Mar. 28, 2002 |
| WO 02/28351 | Recombinant Mucin Binding Proteins From Steptococcus Pneumoniae | Apr. 11, 2002 |
| WO 02/30442 | Method For Treating Cytokine Mediated Hepatic Injury | Apr. 18, 2002 |
| WO 02/34771 | Nucleic Acids And Proteins From Streptococcus Groups A & B | May 2, 2002 |
| WO 02/44737 | Diagnostic And Therapeutic Compositions And Methods Related To G Protein-Coupled Receptor | Jun. 6, 2002 |
| | (Gpcr) Anaphylatoxin C3a Receptor | |
| WO 02/50045 | Antiviral Agents | Jun. 27, 2002 |
| WO 02/51413 | Macrocyclic Anti-Viral Compounds | Jul. 4, 2002 |
| WO 02/53138 | Treatment For Inhibiting Neoplastic Lesions | Jul. 11, 2002 |
| WO 02/57425 | Nucleoside Derivatives As Inhibitors Of Rna-Dependent Rna Viral Polymerase | Jul. 25, 2002 |
| WO 02/59083 | Novel Compounds | Aug. 1, 2002 |
| WO 02/60875 | Nicotinamide Biaryl Derivatives Useful As Inhibitors Of Pde4 Isozymes | Aug. 8, 2002 |
| WO 02/60898 | Thiazolyl-, Oxazolyl-, Pyrrolyl-, And Imidazolyl-Acid Amide Derivatives Useful As Inhibitors | Aug. 8, 2002 |
| | Of Pde4 Isozymes | |
| WO 02/69903 | Nucleosides, Preparation Thereof And Use As Inhibitors Of Rna Viral Polymerases | Sep. 12, 2002 |
| WO 02/72022 | Substituted Tetracycline Compounds As Antifungal Agents | Sep. 19, 2002 |
| WO 02/72031 | Substituted Tetracycline Compounds As Synergistic Antifungal Agents | Sep. 19, 2002 |
| WO 02/76939 | Cysteine Protease Inhibitors | Oct. 3, 2002 |
| WO 02/77021 | Streptococcus Pneumoniae Proteins And Nucleic Acids | Oct. 3, 2002 |
| WO 02/79401 | Novel Rgs9 Protein Binding Interactions And Methods Of Use Thereof | Oct. 10, 2002 |
| WO 02/82041 | Production And Use Of Novel Peptide-Based Agents For Use With Bi-Specific Antibodies | Oct. 17, 2002 |
| WO 02/87465 | Compositions And Methods Of Double-Targeting Virus Infections And Cancer Cells | Nov. 7, 2002 |
| WO 02/87500 | Viral Enzyme Activated Prototoxophores And Use Of Same To Treat Viral Infections | Nov. 7, 2002 |
| WO 02/88091 | Inhibitors Of Human Rhinovirus 2a Cysteine Protease | Nov. 7, 2002 |
| WO 02/89832 | Pharmaceutical Compositions For Preventing Or Treating Th1 And Th2 Cell Related Diseases By | Nov. 14, 2002 |
| | Modulating The Th1/Th2 Ratio. | |
| WO 02/92779 | Method For Enriching Tissues In Long Chain Polyunsaturated Fatty Acids | Nov. 21, 2002 |
| WO 02/94185 | Conjugates And Compositions For Cellular Delivery | Nov. 28, 2002 |
| WO 02/94868 | Staphylococcus Aureus Proteins And Nucleic Acids | Nov. 28, 2002 |
| WO 02/96867 | Inhibitors Of Protein Kinase For The Treatment Of Disease | Dec. 5, 2002 |
| WO 02/98424 | Novel Anti-Infectives | Dec. 12, 2002 |
| WO 03/04489 | Compositions And Methods For Inhibiting Prenyltransferases | Jan. 16, 2003 |
| WO 03/08628 | Enzymatic Nucleic Acid Peptide Conjugates | Jan. 30, 2003 |
| WO 03/15744 | Chitin Microparticles And Their Medical Uses | Feb. 27, 2003 |
| WO 03/20222 | Dioxolane And Oxathiolane Derivatives As Inhibitors Of Rna-Dependent Rna Viral Polymerase | Mar. 13, 2003 |
| WO 03/20270 | Oxadiazolyl-Phenoxyalkylisoxazoles, Compositions Thereof And Methods For Their Use As | Mar. 13, 2003 |
| | Anti-Picornaviral Agents | |
| WO 03/20271 | Oxadiazolyl-Phenoxyalkylisoxazoles, Compositions Thereof And Methods For Their Use As | Mar. 13, 2003 |
| | Anti-Picornaviral Agents | |
| WO 03/20712 | Oxadiazolyl-Phenoxyalkylthiadiazoles, Compositions Thereof And Methods For Their Use As | Mar. 13, 2003 |
| | Anti-Picornaviral Agents | |
| WO 86/03412 | Improvements Relating To The Treatment Control And Prevention Of Rhinovirus Infections | Jun. 19, 1986 |
| WO 86/03971 | Antiviral Agents | Jul. 17, 1986 |
| WO 88/09669 | Avirulent Microbes And Uses Therefor | Dec. 15, 1988 |
| WO 92/03475 | Enterovirus Peptides | Mar. 5, 1992 |
| WO 92/22520 | Orally Active Antiviral Compounds | Dec. 23, 1992 |
| WO 92/22570 | Inhibitors Of Picornavirus Proteases | Dec. 23, 1992 |
| WO 94/00012 | Nucleic Acids And Methods Of Use Thereof For Controlling Viral Pathogens | Jan. 6, 1994 |
| WO 95/03821 | Prosaposin And Cytokine-Derived Peptides As Therapeutic Agents | Feb. 9, 1995 |
| WO 95/09175 | Ring-Expanded Nucleosides And Nucleotides | Apr. 6, 1995 |
| WO 95/11992 | Antiviral Compounds | May 4, 1995 |
| WO 95/31198 | Thiadiazoles And Their Use As Antipicornaviral Agents | Nov. 23, 1995 |
| WO 95/31438 | Therapeutic Phenoxyalkylheterocycles | Nov. 23, 1995 |
| WO 95/31439 | Therapeutic Phenoxyalkylpyridazines And Intermediates Therefor | Nov. 23, 1995 |
| WO 95/31452 | Therapeutic Phenoxyalkylazoles And Phenoxyalkylazines | Nov. 23, 1995 |
| WO 95/34595 | Antiviral Dendrimers | Dec. 21, 1995 |
| WO 95/35103 | A Pharmaceutical Composition For The Prevention And/Or Treatment Of Viral Infections And | Dec. 28, 1995 |
| | Optionally Inflammations As Well As A Method For The Treatment Thereof | |
| WO 96/05836 | Methods Of Treating Cold Symptoms Using Pentoxifylline | Feb. 29, 1996 |
| WO 96/05854 | Combination Preparation, Containing Cyclosporin A Or Fk506 Or Rapamycin And A Xanthine | Feb. 29, 1996 |
| | Derivative | |
| WO 96/09822 | Antipicornaviral Agents | Apr. 4, 1996 |
| WO 96/11211 | Selective Inhibition Of Internally Initiated Rna Translation | Apr. 18, 1996 |
| WO 96/22689 | Multiple Component Rna Catalysts And Uses Thereof | Aug. 1, 1996 |
| WO 96/40641 | Sulfonamide Derivatives As Cell Adhesion Modulators | Dec. 19, 1996 |
| WO 97/08553 | Targeting Of Proteins To The Cell Wall Of Gram-Positive Bacteria | Mar. 6, 1997 |
| WO 97/34566 | Electrophilic Ketones For The Treatment Of Herpesvirus Infections | Sep. 25, 1997 |
| WO 97/41137 | Use Of Anthocyanidin And Anthocyanidin Derivatives | Nov. 6, 1997 |
| WO 97/43305 | Inhibitors Of Picornavirus 3c Proteases And Methods For Their Use And Preparation | Nov. 20, 1997 |
| WO 97/47270 | Novel Anti-Viral Compounds | Dec. 18, 1997 |
| WO 98/03572 | Antiviral Linear Polymers | Jan. 29, 1998 |
| WO 98/07745 | Compositions And Methods For Treating Infections Using Analogues Of Indolicidin | Feb. 26, 1998 |
| WO 98/11778 | Antimicrobial Treatment For Herpes Simplex Virus And Other Infectious Diseases | Mar. 26, 1998 |
| WO 98/22495 | Antikinin Compounds And Uses Thereof | May 28, 1998 |
| WO 98/31363 | Anti-Viral Compounds | Jul. 23, 1998 |
| WO 98/31374 | Method Of Treating Rhinoviral Infections | Jul. 23, 1998 |
| WO 98/32427 | Therapeutic Treatment And Prevention Of Infections With A Bioactive Material Encapsulated | Jul. 30, 1998 |
| | Within A Biodegradable-Biocompatible Polymeric Matrix | |
| WO 98/34601 | Method For Inhibiting Intracellular Viral Replication | Aug. 13, 1998 |
| WO 98/42188 | Antimicrobial Prevention And Treatment Of Human Immunedeficiency Virus And Other | Oct. 1, 1998 |
| | Infectious Diseases | |
| WO 98/43950 | Antipicornaviral Compouds, Compositions Containing Them, And Methods For Their Use | Oct. 8, 1998 |
| WO 98/49190 | Substituted Oxadiazole Cysteine Protease Inhibitors | Nov. 5, 1998 |
| WO 98/55120 | Anti-Viral Compounds | Dec. 10, 1998 |
| WO 99/30699 | Modulators Of Cysteine Protease | Jun. 24, 1999 |
| WO 99/31122 | Antipicornaviral Compounds And Methods For Their Use And Preparation | Jun. 24, 1999 |
| WO 99/54317 | Cysteine Protease Inhibitors | Oct. 28, 1999 |
| WO 99/55663 | Inhibitors Of Impdh Enzyme | Nov. 4, 1999 |
| WO 99/57135 | Antipicornaviral Compounds, Their Preparation And Use | Nov. 11, 1999 |
| WO 99/59587 | Anti-Viral Compounds | Nov. 25, 1999 |
| WO 99/61437 | Novel 2-Alkyl Substituted Imidazole Compounds | Dec. 2, 1999 |

[1661] TABLE 2
US Patents and Published International Patent Applications

| Publication | | Publication |
|---|---|---|
| Number | Title | Date |
| WO 02/69903 | Nucleosides, Preparation Thereof And Use As Inhibitors Of Rna Viral Polymerases | Sep. 12, 2002 |
| WO 02/48116 | Inhibitors Of Hepatitis C Virus Ns3 Protease | Jun. 20, 2002 |
| WO 02/48157 | Imidazolidinones And Their Related Derivatives As Hepatitis C Virus Ns3 Protease Inhibitors | Jun. 20, 2002 |
| WO 02/61048 | In Vitro System For Replication Of Rna-Dependent Rna Polymerase (Rdrp) Viruses | Aug. 8, 2002 |
| WO 03/02518 | Novel 2,4-Difluorobenzamide Derivatives As Antiviral Agents | Jan. 9, 2003 |
| WO 02/79187 | Methoxy-1,3,5-Triazine Derivatives As Antiviral Agents | Oct. 10, 2002 |
| WO 01/78648 | 6-Methylnicotinamide Derivatives As Antiviral Agents | Oct. 25, 2001 |
| WO 01/12214 | MYCOPHENOLATE MOFETIL IN ASSOCIATION WITH PEG-IFN-.Alpha. | Feb. 22, 2001 |
| WO 02/100415 | 4′-Substituted Nucleosides | Dec. 19, 2002 |
| WO 02/18404 | Nucleoside Derivatives | Mar. 7, 2002 |
| WO 02/94289 | Antiviral Nucleoside Derivatives | Nov. 28, 2002 |
| WO 96/39500 | Oligonucleotides Specific For Hepatitis C Virus | Dec. 12, 1996 |
| WO 03/00713 | Nucleoside Compounds In Hcv | Jan. 3, 2003 |
| WO 01/60381 | Nucleoside Analogs With Carboxamidine-Modified Bicyclic Base | Aug. 23, 2001 |
| WO 02/03997 | Pyrido[2,3-D]Pyrimidine And Pyrimido[4,5-D]Pyrimidine Nucleosides | Jan. 17, 2002 |
| WO 97/26883 | Modulation Of Th1/Th2 Cytokine Expression By Ribavirin3 And Ribavirin3 Analogs In | Jul. 31, 1997 |
| | Activated T-Lymphocytes | |
| WO 03/26589 | Methods And Compositions For Treating Hepatitis C Virus Using 4′-Modified Nucleosides | Apr. 3, 2003 |
| WO 03/26675 | Methods And Compositions For Treating Flaviviruses And Pestiviruses Using 4′-Modified | Apr. 3, 2003 |
| | Nucleoside | |
| WO 97/30067 | Sugar-Modified Gapped Oligonucleotides | Aug. 21, 1997 |
| WO 01/47883 | Fused-Ring Compounds And Use Thereof As Drugs | Jul. 5, 2001 |
| WO 03/00254 | Fused Cyclic Compounds And Medicinal Use Thereof | Jan. 3, 2003 |
| WO 02/100354 | Pyrrolo[2,3-D]Pyrimidine Nucleoside Analogs | Dec. 19, 2002 |
| WO 01/55111 | Biaryl Compounds, Their Preparation And Their Use In Therapy | Aug. 2, 2001 |
| WO 01/16149 | 2-Azapurine Compounds And Their Use | Mar. 8, 2001 |
| WO 01/85770 | Sentinel Virus Ii | Nov. 15, 2001 |
| WO 02/12263 | Nucleic Acid Binding Compounds Containing Pyrazolo[3,4-D]Pyrimidine Analogues Of Purin- | Feb. 14, 2002 |
| | 2,6-Diamine And Their Uses | |
| JP 2001-247550 A2 | Condensed Ring Compound And Its Medicinal Use | Sep. 11, 2001 |
| 6210675 | PT-NANB Hepatitis Polypeptides | Apr. 3, 2001 |
| 6451991 | Sugar-Modified Gapped Oligonucleotides | Sep. 17, 2002 |
| 5830455 | Method Of Treatment Using A Therapeutic Combination Of α-Interferon And Free Radical | Nov. 3, 1998 |
| | Scavengers | |
| 5908621 | Polyethylene Glycol Modified Interferon Therapy | Jun. 1, 1999 |
| 5990276 | Synthetic Inhibitors Of Hepatitis C Virus NS3 Protease | Nov. 23, 1999 |
| 6172046 | Combination Therapy For Eradicating Detectable HCV-RNA In Patients Having Chronic | Jan. 9, 2001 |
| | Hepatitis C Infection | |
| 6177074 | Polyethylene Glycol Modified Interferon Therapy | Jan. 23, 2001 |
| 6326137 | Hepatitis C Virus Protease-Dependent Chimeric Pestivirus | Dec. 4, 2001 |
| 6434489 | Compositions Of Hepatitis C Virus NS5B Polymerase And Methods For Crystallizing Same | Aug. 13, 2002 |
| 6461605 | Continuous Low-Dose Cytokine Infusion Therapy | Oct. 8, 2002 |
| 6472373 | Combination Therapy For Eradicating Detectable HCV-RNA In Antiviral Treatment Naive | Oct. 29, 2002 |
| | Patients Having Chronic Hepatitis C Infection | |
| 6524570 | Polyethylene Glycol Modified Interferon Therapy | Feb. 25, 2003 |
| WO 00/37097 | Ribavirin-Interferon Alfa Induction Hcv Combination Therapy | Jun. 29, 2000 |
| WO 00/37110 | Ribavirin-Pegylated Interferon Alfa Induction Hcv Combination Therapy | Jun. 29, 2000 |
| WO 00/62799 | Hcv Combination Therapy, Containing Ribavirin In Association With Antioxidants | Oct. 26, 2000 |
| WO 01/58929 | Azapeptides Useful In The Treatment Of Hepatitis C | Aug. 16, 2001 |
| WO 02/32414 | Ribavirin-Pegylated Interferon Alfa Hcv Combination Therapy | Apr. 25, 2002 |
| WO 03/24461 | Hcv Combination Therapy | Mar. 27, 2003 |
| WO 93/20835 | Treatment Of Hepatitis With Gm-Csf | Oct. 28, 1993 |
| WO 96/36702 | Soluble, Active Hepatitis C Virus Protease | Nov. 21, 1996 |
| WO 97/16204 | Continuous Low-Dose Cytokine Infusion Therapy | May 9, 1997 |
| WO 97/43310 | Synthetic Inhibitors Of Hepatitis C Virus Ns3 Protease | Nov. 20, 1997 |
| WO 98/48840 | Polyethylene Glycol-Interferon Alpha Conjugates For Therapy Of Infection | Nov. 5, 1998 |
| WO 99/15194 | Combination Therapy For Eradicating Detectable Hcv-Rna In Patients Having Chronic | Apr. 1, 1999 |
| | Hepatitis C Infection | |
| WO 99/59621 | Combination Therapy Comprising Ribavirin And Interferon Alpha In Antiviral Treatment | Nov. 25, 1999 |
| | Naive Patients Having G Chronic Hepatitis C Infection | |
| WO 02/100846 | Compounds And Methods For The Treatment Or Prevention Of Flavivirus Infections | Dec. 19, 2002 |
| WO 02/100851 | Compounds And Methods For The Treatment Or Prevention Of Flavivirus Infections | Dec. 19, 2002 |
| 5241053 | Fused Proteins Comprising Glycoprotein Gd Of HSV-1 And LTB | Aug. 31, 1993 |
| 5556946 | Interleukin-2/Viral Antigen Protein Chimers | Sep. 17, 1996 |
| 6087484 | Enhancement Of Ribozyme Catalytic Activity By A 2′-O-Substituted Facilitator | Jul. 11, 2000 |
| | Oligonucleotide | |
| 5830905 | Compounds, Compositions And Methods For Treatment Of Hepatitis C | Nov. 3, 1998 |
| 6316492 | Methods For Treating Or Preventing Viral Infections And Associated Diseases | Nov. 13, 2001 |
| 6440985 | Methods For Treating Viral Infections | Aug. 27, 2002 |
| WO 00/10573 | Compounds, Compositions And Methods For Treating Or Preventing Viral Infections And | Mar. 2, 2000 |
| | Associated Diseases | |
| WO 00/13708 | Methods For Treating Or Preventing Viral Infections And Associated Diseases | Mar. 16, 2000 |
| WO 00/18231 | Methods For Treating Or Preventing Viral Infections And Associated Diseases | Apr. 6, 2000 |
| WO 99/51781 | Hepatitis C Virus Ns5b Compositions And Methods Of Use Thereof | Oct. 14, 1999 |
| 6323180 | Hepatitis C Inhibitor Tri-Peptides | Nov. 27, 2001 |
| 6143715 | Hepatitis C Inhibitor Peptide Analogues | Nov. 7, 2000 |
| 6329379 | Hepatitis C Inhibitor Tri-Peptides | Dec. 11, 2001 |
| 6329417 | Hepatitis C Inhibitor Tri-Pepitides | Dec. 11, 2001 |
| 6410531 | Hepatitis C Inhibitor Tri-Peptides | Jun. 25, 2002 |
| 6420380 | Hepatitis C Inhibitor Tri-Peptides | Jul. 16, 2002 |
| 6448281 | Viral Polymerase Inhibitors | Sep. 10, 2002 |
| 6479508 | Viral Polymerase Inhibitors | Nov. 12, 2002 |
| 6534523 | Hepatitis C Inhibitor Tri-Peptides | Mar. 18, 2003 |
| WO 00/09543 | Hepatitis C Inhibitor Tri-Peptides | Feb. 24, 2000 |
| WO 00/09558 | Hepatitis C Inhibitor Peptides | Feb. 24, 2000 |
| WO 00/59929 | Macrocyclic Peptides Active Against The Hepatitis C Virus | Oct. 12, 2000 |
| WO 02/04425 | Viral Polymerase Inhibitors | Jan. 17, 2002 |
| WO 02/70739 | Hcv Polymerase Inhibitor Assay | Sep. 12, 2002 |
| WO 03/07945 | Viral Polymerase Inhibitors | Jan. 30, 2003 |
| WO 03/10140 | Viral Polymerase Inhibitors | Feb. 6, 2003 |
| WO 03/10141 | Viral Polymerase Inhibitors | Feb. 6, 2003 |
| WO 99/07734 | Hepatitis C Inhibitor Peptide Analogues | Feb. 18, 1999 |
| WO 01/16379 | Hepatitis C Virus Replication Inhibitors | Mar. 8, 2001 |
| WO 02/07761 | Inhibiting Hepatitis C Virus Processing And Replication | Jan. 31, 2002 |
| WO 02/57287 | Nucleoside Derivatives As Inhibitors Of Rna-Dependent Rna Viral Polymerase | Jul. 25, 2002 |
| WO 02/57425 | Nucleoside Derivatives As Inhibitors Of Rna-Dependent Rna Viral Polymerase | Jul. 25, 2002 |
| WO 02/70651 | Viral Reporter Particles | Sep. 12, 2002 |
| WO 03/20222 | Dioxolane And Oxathiolane Derivatives As Inhibitors Of Rna-Dependent Rna Viral Polymerase | Mar. 13, 2003 |
| PCT/US2003/ | Thiosemicarbazones as Anti-Virals and Immunopotentiators | Jan. 10, 2003 |
| 041493 | | |

[1662] TABLE 3
US Patents and published international patent applications relating to inhalation
technology for the delivery of antiviral compounds of the invention.

| Publication | | Publication |
|---|---|---|
| Number | Title | Date |
| 5740794 | Apparatus and methods for dispersing dry powder medicaments | Apr. 21, 1998 |
| 5775320 | Method and device for delivering aerosolized medicaments | Jul. 7, 1998 |
| 5785049 | Method and apparatus for dispersion of dry powder medicaments | Jul. 28, 1998 |
| 5814607 | Pulmonary delivery of active fragments of parathyroid hormone | Sep. 29, 1998 |
| 5826633 | Powder filling systems, apparatus and methods | Oct. 27, 1998 |
| 5458135 | Method and device for delivering aerosolized medicaments | Oct. 17, 1995 |
| 5607915 | Pulmonary delivery of active fragments of parathyroid hormone | Mar. 4, 1997 |
| 5654007 | Methods and system for processing dispersible fine powders | Aug. 5, 1997 |
| 5922354 | Methods and system for processing dispersible fine powders | Jul. 13, 1999 |
| 5928469 | Process for storage of materials | Jul. 27, 1999 |
| 5976574 | Processes for spray drying hydrophobic drugs in organic solvent suspensions | Nov. 2, 1999 |
| 5985248 | processes for spray drying solutions of hydrophobic drugs and compositions thereof | Nov. 16, 1999 |
| 5994314 | Compositions and methods for nucleic acid delivery to the lung | Nov. 30, 1999 |
| 5997848 | Methods and compositions for pulmonary delivery of insulin | Dec. 7, 1999 |
| 6001336 | Processes for spray drying aqueous suspensions of hydrophobic drugs and compositions thereof | Dec. 14, 1999 |
| 6019968 | Dispersible antibody compositions and methods for their preparation and use | Feb. 1, 2000 |
| 6051256 | Dispersible macromolecule compositions and methods for their preparation and use | Apr. 18, 2000 |
| 6071428 | Stable compositions | Jun. 6, 2000 |
| 6077543 | Systems and processes for spray drying hydrophobic drugs with hydrophilic excipients | Jun. 20, 2000 |
| 6080721 | Pulmonary delivery of active fragments of parathyroid hormone | Jun. 27, 2000 |
| 6089228 | Apparatus and methods for dispersing dry powder medicaments | Jul. 18, 2000 |
| 6103270 | Methods and system for processing dispersible fine powders | Aug. 15, 2000 |
| 6123936 | Methods and compositions for the dry powder formulation of interferons | Sep. 26, 2000 |
| 6136346 | Powdered pharmaceutical formulations having improved dispersibility | Oct. 24, 2000 |
| 6138668 | Method and device for delivering aerosolized medicaments | Oct. 31, 2000 |
| 6165463 | Dispersible antibody compositions and methods for their preparation and use | Dec. 26, 2000 |
| 6182712 | Power filling apparatus and methods for their use | Feb. 6, 2001 |
| 6187344 | Powdered pharmaceutical formulations having improved dispersibility | Feb. 13, 2001 |
| 6207135 | Gaseous microparticles for ultrasonic diagnosis and process for their production | Mar. 27, 2001 |
| 6231851 | Methods and compositions for the dry powder formulation of interferons | May 15, 2001 |
| 6257233 | Dry powder dispersing apparatus and methods for their use | Jul. 10, 2001 |
| 6258341 | Stable glassy state powder formulations | Jul. 10, 2001 |
| 6267155 | Powder filling systems, apparatus and methods | Jul. 31, 2001 |
| 6294204 | Method of producing morphologically uniform microcapsules and microcapsules produced by | Sep. 25, 2001 |
| | this method | |
| 6303582 | Compositions and methods for nucleic acid delivery to the lung | Oct. 16, 2001 |
| 6309623 | Stabilized preparations for use in metered dose inhalers | Oct. 30, 2001 |
| 6309671 | Stable glassy state powder formulations | Oct. 30, 2001 |
| 6358530 | Powdered pharmaceutical formulations having improved dispersibility | Mar. 19, 2002 |
| 6365190 | Systems and processes for spray drying hydrophobic drugs with hydrophilic excipients | Apr. 2, 2002 |
| 6372258 | Methods of spray-drying a drug and a hydrophobic amino acid | Apr. 16, 2002 |
| 6423344 | Dispersible macromolecule compositions and methods for their preparation and use | Jul. 23, 2002 |
| 6426210 | Storage of materials | Jul. 30, 2002 |
| 6433040 | Stabilized bioactive preparations and methods of use | Aug. 13, 2002 |
| 6440337 | Method and apparatus for the formation of particles | Aug. 27, 2002 |
| RE37872 | Storage of materials | Oct. 8, 2002 |
| 6479049 | Methods and compositions for the dry powder formulation of interferons | Nov. 12, 2002 |
| 6503411 | Stable compositions | Jan. 7, 2003 |
| 6509006 | Devices compositions and methods for the pulmonary delivery of aerosolized medicaments | Jan. 21, 2003 |
| 6514496 | Dispersible antibody compositions and methods for their preparation and use | Feb. 4, 2003 |
| 6518239 | dry powder compositions having improved dispersivity | Feb. 11, 2003 |
| 6543448 | apparatus and methods for dispersing dry powder medicaments | Apr. 8, 2003 |
| 6546929 | dry powder dispersing apparatus and methods for their use | Apr. 15, 2003 |
| WO 00/15262 | dry powder active agent pulmonary delivery | Mar. 23, 2000 |
| WO 93/00951 | method and device for delivering aerosolized medicaments | Jan. 21, 1993 |
| WO 94/07514 | pulmonary delivery of active fragments of parathyroid hormone | Apr. 14, 1994 |
| WO 95/24183 | methods and compositions for pulmonary delivery of insulin | Sep. 14, 1995 |
| WO 95/31479 | methods and compositions for the dry powder formulation of interferons | Nov. 23, 1995 |
| WO 96/09085 | apparatus and methods for dispersing dry powder medicaments | Mar. 28, 1996 |
| WO 96/32096 | powdered pharmaceutical formulations having improved dispersibility | Oct. 17, 1996 |
| WO 96/32116 | compositions and methods for nucleic acid delivery to the lung | Oct. 17, 1996 |
| WO 96/32149 | pulmonary delivery of aerosolized medicaments | Oct. 17, 1996 |
| WO 96/32152 | pulmonary administration of dry powder alpha 1-antitrypsin | Oct. 17, 1996 |
| WO 96/40068 | methods and system for processing dispersible fine powders | Dec. 19, 1996 |
| WO 97/41031 | powder filling systems, apparatus and methods | Nov. 6, 1997 |
| WO 97/41833 | dispersible macromolecule compositions and methods for their preparation and use | Nov. 13, 1997 |
| WO 98/16205 | stable glassy state powder formulations | Apr. 23, 1998 |
| WO 98/29096 | aerosolized hydrophobic drug | Jul. 9, 1998 |
| WO 98/29098 | processes for spray drying aqueous suspensions of hydrophobic drugs with hydrophilic | Jul. 9, 1998 |
| | excipients and compositions prepared by such processes | |
| WO 98/29140 | processes and compositions for spray drying hydrophobic drugs in organic solvent suspensions | Jul. 9, 1998 |
| | of hydrophilic excipients | |
| WO 98/29141 | processes for spray drying solutions of hydrophobic drugs with hydrophilic excipients and | Jul. 9, 1998 |
| | compositions prepared by such processes | |
| WO 99/19215 | powder filling apparatus and method | Apr. 22, 1999 |
| WO 99/42124 | liquid crystal forms of cyclosporin | Aug. 26, 1999 |
| WO 99/47196 | aerosolized active agent delivery | Sep. 23, 1999 |
| WO 99/62495 | dry powder dispersing apparatus and methods for their use | Dec. 9, 1999 |
| WO 00/21594 | flow resistance modulated aerosolized active agent delivery | Apr. 20, 2000 |
| WO 00/61178 | pulmonary administration of dry powder formulations for treating infertility | Oct. 19, 2000 |
| WO 00/72904 | apparatus and method for dispensing metered amount of aerosolized medication | Dec. 7, 2000 |
| WO 01/00263 | systems and methods for aerosolizing pharmaceutical formulations | Jan. 4, 2001 |
| WO 01/00312 | spray drying process for preparing dry powders | Jan. 4, 2001 |
| WO 01/32144 | dry powder compositions having improved dispersivity | May 10, 2001 |
| WO 01/43529 | receptacles to facilitate the extraction of powders | Jun. 21, 2001 |
| WO 01/43530 | systems and methods for extracting powders from receptacles | Jun. 21, 2001 |
| WO 01/43802 | systems and methods for treating packaged powders | Jun. 21, 2001 |
| WO 01/44764 | systems and methods for non-destructive mass sensing | Jun. 21, 2001 |
| WO 01/87393 | systems, devices and methods for opening receptacles having a powder to be fluidized | Nov. 22, 2001 |
| WO 01/93932 | lockout mechanism for aerosol drug delivery devices | Dec. 13, 2001 |
| WO 02/09669 | apparatus and process to produce particles having a narrow size distribution and particles made | Feb. 7, 2002 |
| | thereby | |
| WO 02/11695 | inhaleable spray dried 4-helix bundle protein powders having minimized aggregation | Feb. 14, 2002 |
| WO 02/49619 | induced phase transition method for the production of microparticles containing hydrophilic | Jun. 27, 2002 |
| | active agents | |
| WO 02/49620 | induced phase transition method for the production of microparticles containing hydrophobic | Jun. 27, 2002 |
| | active agents | |
| WO 02/54868 | pulmonary delivery of polyene antifungal agents | Jul. 18, 2002 |
| WO 02/87542 | novel methods and compositions for delivering macromolecules to or via the respiratory tract | Nov. 7, 2002 |
| WO 02/100548 | centrifuged rotating drum for treating cohesive powders | Dec. 19, 2002 |
| WO 03/00326 | powder aerosolization apparatus and method | Jan. 3, 2003 |
| WO 03/00329 | flow regulator for aerosol drug delivery device and methods | Jan. 3, 2003 |

[1663] TABLE 4
Forward and reverse primers for nucleic acid amplification of SARSV

| | | | | For- | | | | | | | | | | | | |
|---|---|---|---|---|---|---|---|---|---|---|---|---|---|---|---|---|
| | Forward | | | ward | | Reverse | | | | | Prim- | | | Prod- | | Opti- |
| Pair | primer | Forward | Forward | Prim- | Forward | primer | Reverse | Reverse | Reverse | Reverse | er | | Prod- | uct | An- | mum |
| Numb- | SEQ | Primer | Primer | er | Primer | SEQ | Primer | Primer | Primer | Primer | Tm | Product | uct | % | neal | Anneal |
| er | ID NO | Start | Stop | Tm | % GC | ID NO | Start | Stop | Tm | % GC | Diff | Length | Tm | GC | Score | Temp |
| 1 | 1021 | 12726 | 12746 | 51.3 | 47.6 | 3521 | 12996 | 12977 | 50.2 | 40 | 1 | 271 | 75 | 42.8 | 26 | 52.6 |
| 2 | 1022 | 12236 | 12256 | 51.2 | 42.9 | 3522 | 12993 | 12975 | 51.4 | 47.4 | 0.2 | 758 | 76.4 | 42.5 | 26 | 54 |
| 3 | 1023 | 12373 | 12391 | 50.8 | 47.4 | 3523 | 12993 | 12975 | 51.4 | 47.4 | 0.6 | 621 | 76.4 | 43 | 26 | 53.8 |
| 4 | 1024 | 12236 | 12256 | 51.2 | 42.9 | 3524 | 12996 | 12977 | 50.2 | 40 | 0.9 | 761 | 76.4 | 42.3 | 26 | 53.6 |
| 5 | 1025 | 12373 | 12391 | 50.8 | 47.4 | 3525 | 12996 | 12977 | 50.2 | 40 | 0.5 | 624 | 76.4 | 42.8 | 26 | 53.6 |
| 6 | 1026 | 12726 | 12746 | 51.3 | 47.6 | 3526 | 12993 | 12975 | 51.4 | 47.4 | 0.1 | 268 | 75.1 | 43.3 | 26 | 53.1 |
| 7 | 1027 | 2671 | 2692 | 52.1 | 40.9 | 3527 | 3185 | 3164 | 51 | 45.5 | 1.2 | 515 | 75.6 | 41.6 | 26 | 53.3 |
| 8 | 1028 | 28942 | 28961 | 50.2 | 45 | 3528 | 29298 | 29280 | 51.4 | 52.6 | 1.2 | 357 | 76.4 | 44.8 | 26 | 53.6 |
| 9 | 1029 | 19801 | 19819 | 53.2 | 52.6 | 3529 | 19922 | 19901 | 51.5 | 45.5 | 1.7 | 122 | 72.2 | 43.4 | 26 | 51.1 |
| 10 | 1030 | 19800 | 19817 | 50.4 | 50 | 3530 | 19921 | 19901 | 50.2 | 47.6 | 0.3 | 122 | 72.2 | 43.4 | 26 | 50.7 |
| 11 | 1031 | 9930 | 9948 | 51.5 | 52.6 | 3531 | 10605 | 10588 | 51.1 | 50 | 0.4 | 676 | 75.8 | 41.3 | 27 | 53.5 |
| 12 | 1032 | 9933 | 9952 | 50.9 | 45 | 3532 | 10605 | 10588 | 51.1 | 50 | 0.2 | 673 | 75.8 | 41.2 | 27 | 53.4 |
| 13 | 1033 | 9930 | 9949 | 52.2 | 50 | 3533 | 10605 | 10588 | 51.1 | 50 | 1.1 | 676 | 75.8 | 41.3 | 27 | 53.5 |
| 14 | 1034 | 9927 | 9945 | 50.8 | 52.6 | 3534 | 10605 | 10588 | 51.1 | 50 | 0.3 | 679 | 75.8 | 41.2 | 28 | 53.4 |
| 15 | 1035 | 3789 | 3806 | 50 | 50 | 3535 | 4445 | 4425 | 50.6 | 42.9 | 0.5 | 657 | 75.5 | 40.5 | 28 | 52.9 |
| 16 | 1036 | 3788 | 3805 | 50 | 50 | 3536 | 4444 | 4424 | 50.6 | 42.9 | 0.5 | 657 | 75.5 | 40.5 | 28 | 52.9 |
| 17 | 1037 | 3795 | 3813 | 52.1 | 52.6 | 3537 | 4445 | 4425 | 50.6 | 42.9 | 1.5 | 651 | 75.5 | 40.6 | 28 | 53.1 |
| 18 | 1038 | 3787 | 3804 | 50 | 50 | 3538 | 4445 | 4425 | 50.6 | 42.9 | 0.5 | 659 | 75.4 | 40.4 | 28 | 52.9 |
| 19 | 1039 | 19801 | 19819 | 53.2 | 52.6 | 3539 | 19921 | 19900 | 51.8 | 45.5 | 1.4 | 121 | 72.3 | 43.8 | 28 | 51.2 |
| 20 | 1040 | 24418 | 24436 | 50 | 47.4 | 3540 | 25182 | 25164 | 51.4 | 47.4 | 1.4 | 765 | 76.1 | 41.7 | 28 | 53.4 |
| 21 | 1041 | 9929 | 9949 | 53.8 | 47.6 | 3541 | 10449 | 10425 | 54.6 | 40 | 0.8 | 521 | 75.4 | 40.9 | 28 | 54 |
| 22 | 1042 | 2671 | 2692 | 52.1 | 40.9 | 3542 | 3186 | 3165 | 50.4 | 40.9 | 1.7 | 516 | 75.6 | 41.5 | 28 | 53.1 |
| 23 | 1043 | 3792 | 3810 | 52.9 | 52.6 | 3543 | 4446 | 4425 | 51.8 | 45.5 | 1.1 | 655 | 75.5 | 40.6 | 28 | 53.5 |
| 24 | 1044 | 9933 | 9952 | 50.9 | 45 | 3544 | 10449 | 10431 | 50.9 | 47.4 | 0.1 | 517 | 75.3 | 40.8 | 28 | 53.1 |
| 25 | 1045 | 3792 | 3810 | 52.9 | 52.6 | 3545 | 4445 | 4424 | 51.3 | 40.9 | 1.6 | 654 | 75.5 | 40.5 | 28 | 53.3 |
| 26 | 1046 | 25782 | 25806 | 53.5 | 40 | 3546 | 26184 | 26164 | 52.4 | 42.9 | 1.1 | 403 | 74.7 | 40.2 | 28 | 53.1 |
| 27 | 1047 | 9927 | 9945 | 50.8 | 52.6 | 3547 | 10449 | 10431 | 50.9 | 47.4 | 0.1 | 523 | 75.4 | 40.9 | 28 | 53.1 |
| 28 | 1048 | 9927 | 9945 | 50.8 | 52.6 | 3548 | 10449 | 10428 | 51.9 | 40.9 | 1.1 | 523 | 75.4 | 40.9 | 28 | 53.1 |
| 29 | 1049 | 3789 | 3806 | 50 | 50 | 3549 | 4444 | 4424 | 50.6 | 42.9 | 0.5 | 656 | 75.5 | 40.5 | 28 | 53 |
| 30 | 1050 | 3795 | 3813 | 52.1 | 52.6 | 3550 | 4444 | 4424 | 50.6 | 42.9 | 1.5 | 650 | 75.5 | 40.6 | 28 | 53.1 |
| 31 | 1051 | 9933 | 9952 | 50.9 | 45 | 3551 | 10449 | 10428 | 51.9 | 40.9 | 1.1 | 517 | 75.3 | 40.8 | 28 | 53.1 |
| 32 | 1052 | 9930 | 9948 | 51.5 | 52.6 | 3552 | 10449 | 10431 | 50.9 | 47.4 | 0.5 | 520 | 75.4 | 41 | 28 | 53.2 |
| 33 | 1053 | 9930 | 9948 | 51.5 | 52.6 | 3553 | 10449 | 10428 | 51.9 | 40.9 | 0.4 | 520 | 75.4 | 41 | 28 | 53.3 |
| 34 | 1054 | 9929 | 9948 | 53.2 | 50 | 3554 | 10449 | 10425 | 54.6 | 40 | 1.4 | 521 | 75.4 | 40.9 | 28 | 53.8 |
| 35 | 1055 | 9931 | 9952 | 53 | 45.5 | 3555 | 10449 | 10425 | 54.6 | 40 | 1.6 | 519 | 75.3 | 40.8 | 28 | 53.7 |
| 36 | 1056 | 3791 | 3808 | 50 | 50 | 3556 | 4445 | 4425 | 50.6 | 42.9 | 0.5 | 655 | 75.5 | 40.5 | 28 | 52.9 |
| 37 | 1057 | 3791 | 3808 | 50 | 50 | 3557 | 4444 | 4424 | 50.6 | 42.9 | 0.5 | 654 | 75.5 | 40.5 | 28 | 53 |
| 38 | 1058 | 9930 | 9949 | 52.2 | 50 | 3558 | 10449 | 10431 | 50.9 | 47.4 | 1.2 | 520 | 75.4 | 41 | 28 | 53.2 |
| 39 | 1059 | 9930 | 9949 | 52.2 | 50 | 3559 | 10449 | 10428 | 51.9 | 40.9 | 0.3 | 520 | 75.4 | 41 | 28 | 53.5 |
| 40 | 1060 | 3788 | 3805 | 50 | 50 | 3560 | 4445 | 4425 | 50.6 | 42.9 | 0.5 | 658 | 75.5 | 40.4 | 28 | 52.9 |
| 41 | 1061 | 19800 | 19817 | 50.4 | 50 | 3561 | 19921 | 19900 | 51.8 | 45.5 | 1.4 | 122 | 72.2 | 43.4 | 28 | 50.8 |
| 42 | 1062 | 3787 | 3804 | 50 | 50 | 3562 | 4444 | 4424 | 50.6 | 42.9 | 0.5 | 658 | 75.5 | 40.4 | 28 | 52.9 |
| 43 | 1063 | 25782 | 25806 | 53.5 | 40 | 3563 | 26183 | 26163 | 51.7 | 42.9 | 1.7 | 402 | 74.7 | 40.3 | 28 | 52.9 |
| 44 | 1064 | 25782 | 25806 | 53.5 | 40 | 3564 | 26183 | 26160 | 54.5 | 41.7 | 1 | 402 | 74.7 | 40.3 | 28 | 53.5 |
| 45 | 1065 | 25782 | 25806 | 53.5 | 40 | 3565 | 26183 | 26159 | 54.9 | 40 | 1.5 | 402 | 74.7 | 40.3 | 28 | 53.5 |
| 46 | 1066 | 2429 | 2447 | 50.2 | 47.4 | 3566 | 3187 | 3166 | 50.3 | 45.5 | 0.1 | 759 | 76.6 | 43 | 29 | 53.8 |
| 47 | 1067 | 2427 | 2445 | 52.1 | 52.6 | 3567 | 3185 | 3164 | 51 | 45.5 | 1.1 | 759 | 76.7 | 43.1 | 29 | 54.1 |
| 48 | 1068 | 2429 | 2447 | 50.2 | 47.4 | 3568 | 3185 | 3164 | 51 | 45.5 | 0.7 | 757 | 76.6 | 42.9 | 29 | 53.8 |
| 49 | 1069 | 19800 | 19817 | 50.4 | 50 | 3569 | 19923 | 19904 | 50.1 | 50 | 0.3 | 124 | 72.3 | 43.5 | 29 | 50.8 |
| 50 | 1070 | 2427 | 2445 | 52.1 | 52.6 | 3570 | 3187 | 3166 | 50.3 | 45.5 | 1.8 | 761 | 76.7 | 43.1 | 29 | 53.9 |
| 51 | 1071 | 29183 | 29204 | 50.4 | 40.9 | 3571 | 29412 | 29393 | 50.3 | 45 | 0 | 230 | 75.3 | 44.8 | 29 | 52.9 |
| 52 | 1072 | 16367 | 16386 | 51.4 | 50 | 3572 | 16780 | 16760 | 51.4 | 42.9 | 0.1 | 414 | 75 | 40.8 | 30 | 53 |
| 53 | 1073 | 11543 | 11562 | 50.4 | 40 | 3573 | 12254 | 12236 | 50.5 | 47.4 | 0.1 | 712 | 76.2 | 42 | 30 | 53.6 |
| 54 | 1074 | 12976 | 12995 | 51.1 | 45 | 3574 | 13547 | 13528 | 50.2 | 45 | 0.9 | 572 | 77.4 | 45.5 | 30 | 54.3 |
| 55 | 1075 | 12040 | 12057 | 50.6 | 50 | 3575 | 12254 | 12236 | 50.5 | 47.4 | 0.1 | 215 | 75.5 | 45.6 | 30 | 53.1 |
| 56 | 1076 | 12976 | 12996 | 51.8 | 42.9 | 3576 | 13544 | 13525 | 52.6 | 55 | 0.8 | 569 | 77.5 | 45.7 | 30 | 54.8 |
| 57 | 1077 | 10141 | 10160 | 51 | 45 | 3577 | 10605 | 10588 | 51.1 | 50 | 0.1 | 465 | 74.9 | 40.2 | 30 | 52.8 |
| 58 | 1078 | 12235 | 12253 | 50.1 | 52.6 | 3578 | 12996 | 12977 | 50.2 | 40 | 0.1 | 762 | 76.4 | 42.4 | 30 | 53.6 |
| 59 | 1079 | 19795 | 19814 | 50.4 | 45 | 3579 | 19921 | 19901 | 50.2 | 47.6 | 0.3 | 127 | 72.3 | 43.3 | 30 | 50.8 |
| 60 | 1080 | 12235 | 12253 | 50.1 | 52.6 | 3580 | 12993 | 12975 | 51.4 | 47.4 | 1.3 | 759 | 76.5 | 42.6 | 30 | 53.7 |
| 61 | 1081 | 12976 | 12994 | 50.3 | 47.4 | 3581 | 13547 | 13528 | 50.2 | 45 | 0.1 | 572 | 77.4 | 45.5 | 30 | 54.3 |
| 62 | 1082 | 12975 | 12994 | 52.1 | 45 | 3582 | 13544 | 13525 | 52.6 | 55 | 0.5 | 570 | 77.4 | 45.6 | 30 | 54.9 |
| 63 | 1083 | 12977 | 12996 | 50.2 | 40 | 3583 | 13547 | 13528 | 50.2 | 45 | 0 | 571 | 77.3 | 45.4 | 30 | 54.3 |
| 64 | 1084 | 11541 | 11561 | 50.9 | 42.9 | 3584 | 12254 | 12236 | 50.5 | 47.4 | 0.3 | 714 | 76.2 | 42 | 30 | 53.6 |
| 65 | 1085 | 28394 | 28411 | 50.3 | 50 | 3585 | 28672 | 28654 | 50.6 | 52.6 | 0.3 | 279 | 78.6 | 51.6 | 30 | 55.2 |
| 66 | 1086 | 9930 | 9948 | 51.5 | 52.6 | 3586 | 10455 | 10434 | 51.1 | 40.9 | 0.3 | 526 | 75.3 | 40.7 | 30 | 53.1 |
| 67 | 1087 | 8220 | 8238 | 51.5 | 47.4 | 3587 | 8929 | 8911 | 53.4 | 52.6 | 1.9 | 710 | 75.4 | 40 | 30 | 53.3 |
| 68 | 1088 | 9930 | 9949 | 52.2 | 50 | 3588 | 10455 | 10435 | 50.5 | 42.9 | 1.7 | 526 | 75.3 | 40.7 | 30 | 52.9 |
| 69 | 1089 | 12236 | 12256 | 51.2 | 42.9 | 3589 | 12412 | 12392 | 50 | 42.9 | 1.2 | 177 | 73 | 41.2 | 30 | 51.2 |
| 70 | 1090 | 9930 | 9949 | 52.2 | 50 | 3590 | 10455 | 10434 | 51.1 | 40.9 | 1.1 | 526 | 75.3 | 40.7 | 30 | 53.1 |
| 71 | 1091 | 9933 | 9952 | 50.9 | 45 | 3591 | 10455 | 10435 | 50.5 | 42.9 | 0.4 | 523 | 75.2 | 40.5 | 30 | 52.9 |
| 72 | 1092 | 12726 | 12746 | 51.3 | 47.6 | 3592 | 13314 | 13297 | 51 | 50 | 0.3 | 589 | 76.6 | 43.6 | 30 | 54 |
| 73 | 1093 | 9933 | 9952 | 50.9 | 45 | 3593 | 10455 | 10434 | 51.1 | 40.9 | 0.3 | 523 | 75.2 | 40.5 | 30 | 53 |
| 74 | 1094 | 16909 | 16928 | 50.8 | 45 | 3594 | 17501 | 17481 | 51.2 | 42.9 | 0.4 | 593 | 75.9 | 41.8 | 30 | 53.5 |
| 75 | 1095 | 12975 | 12993 | 51.4 | 47.4 | 3595 | 13544 | 13525 | 52.6 | 55 | 1.2 | 570 | 77.4 | 45.6 | 30 | 54.7 |
| 76 | 1096 | 2671 | 2692 | 52.1 | 40.9 | 3596 | 3187 | 3166 | 50.3 | 45.5 | 1.8 | 517 | 75.6 | 41.6 | 30 | 53.1 |
| 77 | 1097 | 19800 | 19818 | 52.1 | 52.6 | 3597 | 19921 | 19900 | 51.8 | 45.5 | 0.3 | 122 | 72.2 | 43.4 | 30 | 51.2 |
| 78 | 1098 | 12975 | 12993 | 51.4 | 47.4 | 3598 | 13547 | 13528 | 50.2 | 45 | 1.2 | 573 | 77.3 | 45.4 | 30 | 54.3 |
| 79 | 1099 | 9930 | 9948 | 51.5 | 52.6 | 3599 | 10455 | 10435 | 50.5 | 42.9 | 1 | 526 | 75.3 | 40.7 | 30 | 52.9 |
| 80 | 1100 | 12976 | 12995 | 51.1 | 45 | 3600 | 13544 | 13525 | 52.6 | 55 | 1.5 | 569 | 77.5 | 45.7 | 30 | 54.6 |
| 81 | 1101 | 24635 | 24653 | 50.5 | 52.6 | 3601 | 25182 | 25164 | 51.4 | 47.4 | 0.9 | 548 | 75.1 | 40.1 | 30 | 52.8 |
| 82 | 1102 | 24633 | 24651 | 50.1 | 52.6 | 3602 | 25182 | 25164 | 51.4 | 47.4 | 1.3 | 550 | 75.2 | 40.2 | 30 | 52.7 |
| 83 | 1103 | 24630 | 24648 | 50.8 | 52.6 | 3603 | 25182 | 25164 | 51.4 | 47.4 | 0.6 | 553 | 75.2 | 40.3 | 30 | 53 |
| 84 | 1104 | 28394 | 28412 | 51.1 | 47.4 | 3604 | 28672 | 28654 | 50.6 | 52.6 | 0.5 | 279 | 78.6 | 51.6 | 30 | 55.3 |
| 85 | 1105 | 28395 | 28413 | 50.2 | 42.1 | 3605 | 28672 | 28654 | 50.6 | 52.6 | 0.4 | 278 | 78.6 | 51.4 | 30 | 55.2 |
| 86 | 1106 | 28396 | 28415 | 51.2 | 45 | 3606 | 28672 | 28654 | 50.6 | 52.6 | 0.6 | 277 | 78.6 | 51.6 | 30 | 55.3 |
| 87 | 1107 | 26421 | 26441 | 51.5 | 42.9 | 3607 | 26587 | 26568 | 52.7 | 45 | 1.2 | 167 | 72.3 | 40.1 | 30 | 51.2 |
| 88 | 1108 | 26421 | 26441 | 51.5 | 42.9 | 3608 | 26589 | 26571 | 51.7 | 47.4 | 0.2 | 169 | 72.4 | 40.2 | 30 | 51.2 |
| 89 | 1109 | 26421 | 26441 | 51.5 | 42.9 | 3609 | 26589 | 26572 | 51 | 50 | 0.5 | 169 | 72.4 | 40.2 | 30 | 51.1 |
| 90 | 1110 | 26421 | 26441 | 51.5 | 42.9 | 3610 | 26590 | 26573 | 51.7 | 50 | 0.3 | 170 | 72.3 | 40 | 30 | 51.2 |
| 91 | 1111 | 26040 | 26061 | 56.4 | 54.5 | 3611 | 26589 | 26568 | 55.2 | 45.5 | 1.2 | 550 | 75.1 | 40 | 30 | 54.2 |
| 92 | 1112 | 26039 | 26057 | 52.6 | 52.6 | 3612 | 26183 | 26160 | 54.5 | 41.7 | 1.9 | 145 | 71.9 | 40.7 | 30 | 51.2 |
| 93 | 1113 | 26039 | 26057 | 52.6 | 52.6 | 3613 | 26182 | 26161 | 51.2 | 40.9 | 1.4 | 144 | 71.7 | 40.3 | 30 | 50.7 |
| 94 | 1114 | 26039 | 26057 | 52.6 | 52.6 | 3614 | 26183 | 26163 | 51.7 | 42.9 | 0.9 | 145 | 71.9 | 40.7 | 30 | 51 |
| 95 | 1115 | 8867 | 8887 | 52.3 | 47.6 | 3615 | 9253 | 9235 | 51.6 | 47.4 | 0.7 | 387 | 75.1 | 41.3 | 30 | 53.2 |
| 96 | 1116 | 10247 | 10267 | 50.5 | 47.6 | 3616 | 10605 | 10588 | 51.1 | 50 | 0.6 | 359 | 74.6 | 40.4 | 30 | 52.4 |
| 97 | 1117 | 11540 | 11557 | 50.4 | 50 | 3617 | 12254 | 12236 | 50.5 | 47.4 | 0.1 | 715 | 76.2 | 42.1 | 30 | 53.6 |
| 98 | 1118 | 11541 | 11560 | 50.1 | 45 | 3618 | 12254 | 12236 | 50.5 | 47.4 | 0.4 | 714 | 76.2 | 42 | 30 | 53.5 |
| 99 | 1119 | 8221 | 8240 | 52.4 | 50 | 3619 | 8929 | 8911 | 53.4 | 52.6 | 1 | 709 | 75.4 | 40.1 | 30 | 53.6 |
| 100 | 1120 | 13039 | 13057 | 51.1 | 52.6 | 3620 | 13177 | 13156 | 50.4 | 40.9 | 0.7 | 139 | 73.9 | 46 | 31 | 52 |
| 101 | 1121 | 19801 | 19819 | 53.2 | 52.6 | 3621 | 19917 | 19895 | 52.5 | 43.5 | 0.8 | 117 | 72 | 43.6 | 31 | 51.2 |
| 102 | 1122 | 19709 | 19730 | 51.3 | 40.9 | 3622 | 19921 | 19900 | 51.8 | 45.5 | 0.5 | 213 | 73.9 | 41.8 | 31 | 52.2 |
| 103 | 1123 | 16366 | 16386 | 54.4 | 52.4 | 3623 | 16774 | 16751 | 53.6 | 41.7 | 0.8 | 409 | 75.1 | 41.1 | 31 | 53.8 |
| 104 | 1124 | 3 | 21 | 53.4 | 52.6 | 3624 | 256 | 235 | 52.6 | 45.5 | 0.8 | 254 | 76.1 | 46.1 | 31 | 54.2 |
| 105 | 1125 | 4 | 22 | 52.3 | 52.6 | 3625 | 314 | 296 | 50.6 | 47.4 | 1.7 | 311 | 76.8 | 46.6 | 31 | 54.1 |
| 106 | 1126 | 13039 | 13058 | 51.8 | 50 | 3626 | 13177 | 13156 | 50.4 | 40.9 | 1.5 | 139 | 73.9 | 46 | 31 | 52 |
| 107 | 1127 | 19800 | 19817 | 50.4 | 50 | 3627 | 19916 | 19895 | 50.2 | 40.9 | 0.2 | 117 | 71.7 | 42.7 | 31 | 50.3 |
| 108 | 1128 | 4645 | 4665 | 50.2 | 42.9 | 3628 | 5306 | 5289 | 50.8 | 50 | 0.5 | 662 | 75.6 | 40.8 | 31 | 53.1 |
| 109 | 1129 | 13039 | 13057 | 51.1 | 52.6 | 3629 | 13747 | 13726 | 50.8 | 40.9 | 0.4 | 709 | 76.6 | 43.2 | 31 | 54 |
| 110 | 1130 | 13039 | 13058 | 51.8 | 50 | 3630 | 13747 | 13726 | 50.8 | 40.9 | 1.1 | 709 | 76.6 | 43.2 | 31 | 54 |
| 111 | 1131 | 3 | 21 | 53.4 | 52.6 | 3631 | 253 | 233 | 51.8 | 47.6 | 1.6 | 251 | 76.2 | 46.2 | 31 | 54 |
| 112 | 1132 | 27365 | 27385 | 53.2 | 47.6 | 3632 | 27464 | 27444 | 53 | 42.9 | 0.2 | 100 | 70.8 | 43 | 31 | 50.6 |
| 113 | 1133 | 24418 | 24436 | 50 | 47.4 | 3633 | 24527 | 24508 | 50.5 | 45 | 0.5 | 110 | 71.3 | 42.7 | 31 | 50 |
| 114 | 1134 | 26708 | 26727 | 50 | 45 | 3634 | 27463 | 27446 | 50 | 44.4 | 0 | 756 | 75.9 | 41.1 | 31 | 53.2 |
| 115 | 1135 | 24179 | 24200 | 53.3 | 40.9 | 3635 | 24936 | 24919 | 51.8 | 50 | 1.5 | 758 | 75.8 | 41 | 31 | 53.7 |
| 116 | 1136 | 26708 | 26727 | 50 | 45 | 3636 | 27462 | 27444 | 50.1 | 42.1 | 0.1 | 755 | 75.9 | 41.2 | 31 | 53.2 |
| 117 | 1137 | 26708 | 26731 | 54.2 | 41.7 | 3637 | 27465 | 27446 | 54.6 | 50 | 0.4 | 758 | 75.9 | 41.3 | 31 | 54.5 |
| 118 | 1138 | 27365 | 27384 | 52.6 | 50 | 3638 | 27464 | 27446 | 51.7 | 47.4 | 0.9 | 100 | 70.8 | 43 | 31 | 50.2 |
| 119 | 1139 | 27365 | 27384 | 52.6 | 50 | 3639 | 27464 | 27445 | 52.4 | 45 | 0.2 | 100 | 70.8 | 43 | 31 | 50.4 |
| 120 | 1140 | 27365 | 27384 | 52.6 | 50 | 3640 | 27464 | 27444 | 53 | 42.9 | 0.4 | 100 | 70.8 | 43 | 31 | 50.4 |
| 121 | 1141 | 27367 | 27385 | 51.4 | 52.6 | 3641 | 27571 | 27552 | 50.1 | 40 | 1.3 | 205 | 74.6 | 43.9 | 31 | 52.4 |
| 122 | 1142 | 27367 | 27385 | 51.4 | 52.6 | 3642 | 27567 | 27547 | 51.1 | 42.9 | 0.2 | 201 | 74.7 | 44.3 | 31 | 52.7 |
| 123 | 1143 | 2427 | 2445 | 52.1 | 52.6 | 3643 | 3186 | 3165 | 50.4 | 40.9 | 1.7 | 760 | 76.7 | 43 | 31 | 53.9 |
| 124 | 1144 | 8867 | 8887 | 52.3 | 47.6 | 3644 | 9256 | 9237 | 50.8 | 45 | 1.5 | 390 | 75.1 | 41.3 | 31 | 52.9 |
| 125 | 1145 | 9934 | 9953 | 50.7 | 50 | 3645 | 10605 | 10588 | 51.1 | 50 | 0.4 | 672 | 75.8 | 41.2 | 31 | 53.4 |
| 126 | 1146 | 2429 | 2447 | 50.2 | 47.4 | 3646 | 3186 | 3165 | 50.4 | 40.9 | 0.2 | 758 | 76.6 | 42.9 | 31 | 53.8 |
| 127 | 1147 | 27365 | 27385 | 53.2 | 47.6 | 3647 | 27464 | 27445 | 52.4 | 45 | 0.8 | 100 | 70.8 | 43 | 31 | 50.4 |
| 128 | 1148 | 19994 | 20011 | 50.4 | 50 | 3648 | 20615 | 20597 | 50.6 | 47.4 | 0.2 | 622 | 75.2 | 40 | 31 | 52.9 |
| 129 | 1149 | 9922 | 9941 | 51.3 | 50 | 3649 | 10605 | 10588 | 51.1 | 50 | 0.2 | 684 | 75.8 | 41.2 | 32 | 53.5 |
| 130 | 1150 | 12962 | 12980 | 50.7 | 47.4 | 3650 | 13544 | 13525 | 52.6 | 55 | 1.8 | 583 | 77.5 | 45.6 | 32 | 54.5 |
| 131 | 1151 | 12965 | 12988 | 54 | 41.7 | 3651 | 13544 | 13525 | 52.6 | 55 | 1.5 | 580 | 77.4 | 45.5 | 32 | 55 |
| 132 | 1152 | 13176 | 13197 | 52.7 | 45.5 | 3652 | 13544 | 13525 | 52.6 | 55 | 0.1 | 369 | 77.1 | 46.3 | 32 | 54.8 |
| 133 | 1153 | 28867 | 28886 | 53.2 | 50 | 3653 | 29298 | 29280 | 51.4 | 52.6 | 1.7 | 432 | 76.8 | 45.1 | 32 | 54.3 |
| 134 | 1154 | 24418 | 24439 | 52.9 | 45.5 | 3654 | 25182 | 25164 | 51.4 | 47.4 | 1.5 | 765 | 76.1 | 41.7 | 32 | 53.8 |
| 135 | 1155 | 24420 | 24440 | 50.8 | 42.9 | 3655 | 25182 | 25164 | 51.4 | 47.4 | 0.6 | 763 | 76.1 | 41.5 | 32 | 53.6 |
| 136 | 1156 | 8867 | 8887 | 52.3 | 47.6 | 3656 | 9107 | 9086 | 51.6 | 45.5 | 0.7 | 241 | 74.1 | 41.5 | 32 | 52.5 |
| 137 | 1157 | 1402 | 1422 | 50.2 | 42.9 | 3657 | 2103 | 2083 | 50.6 | 42.9 | 0.4 | 702 | 76.7 | 43.3 | 32 | 53.8 |
| 138 | 1158 | 25782 | 25805 | 52.1 | 41.7 | 3658 | 26183 | 26163 | 51.7 | 42.9 | 0.4 | 402 | 74.7 | 40.3 | 32 | 52.9 |
| 139 | 1159 | 25781 | 25805 | 53.5 | 40 | 3659 | 26183 | 26160 | 54.5 | 41.7 | 1 | 403 | 74.7 | 40.2 | 32 | 53.4 |
| 140 | 1160 | 25781 | 25805 | 53.5 | 40 | 3660 | 26183 | 26159 | 54.9 | 40 | 1.5 | 403 | 74.7 | 40.2 | 32 | 53.4 |
| 141 | 1161 | 2671 | 2692 | 52.1 | 40.9 | 3661 | 3052 | 3033 | 50.3 | 50 | 1.8 | 382 | 74.8 | 40.6 | 32 | 52.5 |
| 142 | 1162 | 12726 | 12746 | 51.3 | 47.6 | 3662 | 13177 | 13156 | 50.4 | 40.9 | 0.9 | 452 | 76.4 | 43.8 | 32 | 53.7 |
| 143 | 1163 | 16909 | 16928 | 50.8 | 45 | 3663 | 17111 | 17090 | 51.1 | 40.9 | 0.3 | 203 | 75 | 44.8 | 32 | 52.8 |
| 144 | 1164 | 12234 | 12252 | 50.6 | 47.4 | 3664 | 12993 | 12975 | 51.4 | 47.4 | 0.8 | 760 | 76.4 | 42.5 | 32 | 53.8 |
| 145 | 1165 | 26039 | 26057 | 52.6 | 52.6 | 3665 | 26828 | 26810 | 52.9 | 52.6 | 0.2 | 790 | 76.4 | 42.4 | 32 | 54.4 |
| 146 | 1166 | 26039 | 26057 | 52.6 | 52.6 | 3666 | 26694 | 26677 | 51.4 | 50 | 1.2 | 656 | 75.7 | 41 | 32 | 53.5 |
| 147 | 1167 | 26039 | 26057 | 52.6 | 52.6 | 3667 | 26692 | 26674 | 51.9 | 52.6 | 0.7 | 654 | 75.7 | 41 | 32 | 53.6 |
| 148 | 1168 | 26039 | 26057 | 52.6 | 52.6 | 3668 | 26691 | 26673 | 51.3 | 47.4 | 1.3 | 653 | 75.6 | 40.9 | 32 | 53.4 |
| 149 | 1169 | 26039 | 26057 | 52.6 | 52.6 | 3669 | 26687 | 26669 | 51.3 | 47.4 | 1.3 | 649 | 75.6 | 40.8 | 32 | 53.4 |
| 150 | 1170 | 26039 | 26057 | 52.6 | 52.6 | 3670 | 26684 | 26666 | 53.4 | 52.6 | 0.8 | 646 | 75.6 | 40.9 | 32 | 53.8 |
| 151 | 1171 | 26039 | 26057 | 52.6 | 52.6 | 3671 | 26683 | 26665 | 52.7 | 52.6 | 0.1 | 645 | 75.6 | 40.9 | 32 | 53.8 |
| 152 | 1172 | 9934 | 9953 | 50.7 | 50 | 3672 | 10449 | 10431 | 50.9 | 47.4 | 0.2 | 516 | 75.4 | 40.9 | 32 | 53.1 |
| 153 | 1173 | 9927 | 9945 | 50.8 | 52.6 | 3673 | 10455 | 10434 | 51.1 | 40.9 | 0.3 | 529 | 75.3 | 40.6 | 32 | 53 |
| 154 | 1174 | 7728 | 7746 | 51.7 | 52.6 | 3674 | 8188 | 8169 | 50.5 | 45 | 1.2 | 461 | 75.6 | 41.9 | 32 | 53.2 |
| 155 | 1175 | 18550 | 18571 | 50.4 | 40.9 | 3675 | 19216 | 19195 | 50.2 | 40.9 | 0.2 | 667 | 75.7 | 41.1 | 32 | 53.2 |
| 156 | 1176 | 19801 | 19819 | 53.2 | 52.6 | 3676 | 19921 | 19899 | 52.4 | 43.5 | 0.8 | 121 | 72.3 | 43.8 | 32 | 51.4 |
| 157 | 1177 | 19709 | 19730 | 51.3 | 40.9 | 3677 | 19923 | 19904 | 50.1 | 50 | 1.2 | 215 | 73.9 | 41.9 | 32 | 51.9 |
| 158 | 1178 | 4639 | 4659 | 51.1 | 47.6 | 3678 | 5306 | 5289 | 50.8 | 50 | 0.3 | 668 | 75.6 | 40.9 | 32 | 53.3 |
| 159 | 1179 | 19794 | 19813 | 50 | 50 | 3679 | 19921 | 19901 | 50.2 | 47.6 | 0.2 | 128 | 72.6 | 43.8 | 32 | 50.9 |
| 160 | 1180 | 12965 | 12985 | 51.2 | 42.9 | 3680 | 13544 | 13525 | 52.6 | 55 | 1.4 | 580 | 77.4 | 45.5 | 32 | 54.6 |
| 161 | 1181 | 9932 | 9953 | 53 | 45.5 | 3681 | 10449 | 10425 | 54.6 | 40 | 1.6 | 518 | 75.3 | 40.7 | 32 | 53.7 |
| 162 | 1182 | 19795 | 19814 | 50.4 | 45 | 3682 | 19921 | 19900 | 51.8 | 45.5 | 1.4 | 127 | 72.3 | 43.3 | 32 | 50.9 |
| 163 | 1183 | 27366 | 27384 | 52.2 | 52.6 | 3683 | 27468 | 27451 | 51.1 | 50 | 1 | 103 | 71.3 | 43.7 | 32 | 50.3 |
| 164 | 1184 | 27366 | 27384 | 52.2 | 52.6 | 3684 | 27467 | 27450 | 52.1 | 50 | 0.1 | 102 | 71.4 | 44.1 | 32 | 50.7 |
| 165 | 1185 | 27366 | 27384 | 52.2 | 52.6 | 3685 | 27466 | 27449 | 51 | 50 | 1.2 | 101 | 71.5 | 44.6 | 32 | 50.4 |
| 166 | 1186 | 25782 | 25805 | 52.1 | 41.7 | 3686 | 26183 | 26164 | 51 | 45 | 1.1 | 402 | 74.7 | 40.3 | 32 | 52.7 |
| 167 | 1187 | 9934 | 9953 | 50.7 | 50 | 3687 | 10449 | 10428 | 51.9 | 40.9 | 1.2 | 516 | 75.4 | 40.9 | 32 | 53.1 |
| 168 | 1188 | 9925 | 9945 | 53.4 | 52.4 | 3688 | 10449 | 10425 | 54.6 | 40 | 1.2 | 525 | 75.4 | 41 | 32 | 53.9 |
| 169 | 1189 | 19800 | 19817 | 50.4 | 50 | 3689 | 19922 | 19902 | 50 | 42.9 | 0.4 | 123 | 72.1 | 43.1 | 32 | 50.6 |
| 170 | 1190 | 8867 | 8887 | 52.3 | 47.6 | 3690 | 9310 | 9291 | 51.2 | 45 | 1.2 | 444 | 75.4 | 41.4 | 32 | 53.2 |
| 171 | 1191 | 27367 | 27385 | 51.4 | 52.6 | 3691 | 27468 | 27451 | 51.1 | 50 | 0.3 | 102 | 71.4 | 44.1 | 32 | 50.4 |
| 172 | 1192 | 27367 | 27385 | 51.4 | 52.6 | 3692 | 27467 | 27450 | 52.1 | 50 | 0.7 | 101 | 71.5 | 44.6 | 32 | 50.6 |
| 173 | 1193 | 2671 | 2692 | 52.1 | 40.9 | 3693 | 3082 | 3058 | 52.3 | 40 | 0.2 | 412 | 74.9 | 40.5 | 32 | 53.2 |
| 174 | 1194 | 9927 | 9945 | 50.8 | 52.6 | 3694 | 10608 | 10589 | 51 | 50 | 0.2 | 682 | 75.8 | 41.2 | 32 | 53.4 |
| 175 | 1195 | 19800 | 19817 | 50.4 | 50 | 3695 | 19920 | 19899 | 50.2 | 40.9 | 0.3 | 121 | 71.9 | 43 | 32 | 50.5 |
| 176 | 1196 | 13177 | 13197 | 50.3 | 42.9 | 3696 | 13547 | 13528 | 50.2 | 45 | 0.1 | 371 | 76.9 | 45.8 | 32 | 54 |
| 177 | 1197 | 28179 | 28200 | 50.8 | 40.9 | 3697 | 28672 | 28654 | 50.6 | 52.6 | 0.3 | 494 | 79.8 | 51.8 | 32 | 56.1 |
| 178 | 1198 | 27367 | 27385 | 51.4 | 52.6 | 3698 | 27466 | 27449 | 51 | 50 | 0.4 | 100 | 71.6 | 45 | 32 | 50.5 |
| 179 | 1199 | 27366 | 27385 | 52.8 | 50 | 3699 | 27465 | 27446 | 54.6 | 50 | 1.7 | 100 | 71.2 | 44 | 32 | 50.8 |
| 180 | 1200 | 19800 | 19818 | 52.1 | 52.6 | 3700 | 19921 | 19901 | 50.2 | 47.6 | 2 | 122 | 72.2 | 43.4 | 32 | 50.7 |
| 181 | 1201 | 9927 | 9945 | 50.8 | 52.6 | 3701 | 10455 | 10435 | 50.5 | 42.9 | 0.3 | 529 | 75.3 | 40.6 | 32 | 52.9 |
| 182 | 1202 | 28868 | 28887 | 50.7 | 45 | 3702 | 29298 | 29280 | 51.4 | 52.6 | 0.7 | 431 | 76.8 | 45 | 32 | 54.1 |
| 183 | 1203 | 28867 | 28887 | 53.7 | 47.6 | 3703 | 29306 | 29288 | 53.5 | 52.6 | 0.3 | 440 | 76.9 | 45.2 | 32 | 55 |
| 184 | 1204 | 28867 | 28887 | 53.7 | 47.6 | 3704 | 29301 | 29282 | 55.3 | 55 | 1.5 | 435 | 76.9 | 45.3 | 32 | 55.1 |
| 185 | 1205 | 28868 | 28888 | 51.4 | 42.9 | 3705 | 29298 | 29280 | 51.4 | 52.6 | 0 | 431 | 76.8 | 45 | 32 | 54.3 |
| 186 | 1206 | 28867 | 28888 | 54.3 | 45.5 | 3706 | 29306 | 29288 | 53.5 | 52.6 | 0.8 | 440 | 76.9 | 45.2 | 32 | 55 |
| 187 | 1207 | 28867 | 28888 | 54.3 | 45.5 | 3707 | 29301 | 29282 | 55.3 | 55 | 1 | 435 | 76.9 | 45.3 | 32 | 55.2 |
| 188 | 1208 | 28870 | 28889 | 50.1 | 40 | 3708 | 29298 | 29280 | 51.4 | 52.6 | 1.3 | 429 | 76.8 | 45 | 32 | 53.9 |
| 189 | 1209 | 28868 | 28889 | 52 | 40.9 | 3709 | 29306 | 29288 | 53.5 | 52.6 | 1.5 | 439 | 76.9 | 45.1 | 32 | 54.5 |
| 190 | 1210 | 28867 | 28889 | 54.8 | 43.5 | 3710 | 29301 | 29282 | 55.3 | 55 | 0.5 | 435 | 76.9 | 45.3 | 32 | 55.4 |
| 191 | 1211 | 28867 | 28890 | 55.2 | 41.7 | 3711 | 29306 | 29288 | 53.5 | 52.6 | 1.7 | 440 | 76.9 | 45.2 | 32 | 55 |
| 192 | 1212 | 28867 | 28890 | 55.2 | 41.7 | 3712 | 29301 | 29282 | 55.3 | 55 | 0.1 | 435 | 76.9 | 45.3 | 32 | 55.5 |
| 193 | 1213 | 28867 | 28890 | 55.2 | 41.7 | 3713 | 29299 | 29280 | 53.9 | 55 | 1.3 | 433 | 76.9 | 45.3 | 32 | 55.1 |
| 194 | 1214 | 12234 | 12252 | 50.6 | 47.4 | 3714 | 12996 | 12977 | 50.2 | 40 | 0.3 | 763 | 76.4 | 42.3 | 32 | 53.6 |
| 195 | 1215 | 28968 | 28988 | 50.9 | 47.6 | 3715 | 29298 | 29280 | 51.4 | 52.6 | 0.6 | 331 | 76.2 | 44.7 | 32 | 53.7 |
| 196 | 1216 | 28968 | 28989 | 51.5 | 45.5 | 3716 | 29298 | 29280 | 51.4 | 52.6 | 0.1 | 331 | 76.2 | 44.7 | 32 | 53.9 |
| 197 | 1217 | 13230 | 13251 | 52.4 | 45.5 | 3717 | 13544 | 13525 | 52.6 | 55 | 0.1 | 315 | 77.2 | 47.3 | 32 | 54.8 |
| 198 | 1218 | 29186 | 29205 | 50.1 | 40 | 3718 | 29298 | 29280 | 51.4 | 52.6 | 1.3 | 113 | 72.8 | 46 | 32 | 51.1 |
| 199 | 1219 | 29195 | 29213 | 51.9 | 52.6 | 3719 | 29306 | 29288 | 53.5 | 52.6 | 1.6 | 112 | 73.6 | 48.2 | 32 | 52.2 |
| 200 | 1220 | 29195 | 29213 | 51.9 | 52.6 | 3720 | 29298 | 29280 | 51.4 | 52.6 | 0.5 | 104 | 73.1 | 48.1 | 32 | 51.7 |
| 201 | 1221 | 29196 | 29214 | 51.1 | 52.6 | 3721 | 29298 | 29280 | 51.4 | 52.6 | 0.3 | 103 | 73.3 | 48.5 | 32 | 51.7 |
| 202 | 1222 | 29195 | 29214 | 52.6 | 50 | 3722 | 29306 | 29288 | 53.5 | 52.6 | 0.9 | 112 | 73.6 | 48.2 | 32 | 52.4 |
| 203 | 1223 | 29196 | 29215 | 51.8 | 50 | 3723 | 29306 | 29288 | 53.5 | 52.6 | 1.6 | 111 | 73.8 | 48.6 | 32 | 52.3 |
| 204 | 1224 | 29196 | 29215 | 51.8 | 50 | 3724 | 29298 | 29280 | 51.4 | 52.6 | 0.4 | 103 | 73.3 | 48.5 | 32 | 51.8 |
| 205 | 1225 | 29197 | 29216 | 50 | 45 | 3725 | 29298 | 29280 | 51.4 | 52.6 | 1.4 | 102 | 73 | 48 | 32 | 51.2 |
| 206 | 1226 | 29196 | 29216 | 52.5 | 47.6 | 3726 | 29306 | 29288 | 53.5 | 52.6 | 1 | 111 | 73.8 | 48.6 | 32 | 52.5 |
| 207 | 1227 | 29195 | 29216 | 53.8 | 45.5 | 3727 | 29301 | 29282 | 55.3 | 55 | 1.5 | 107 | 73.5 | 48.6 | 32 | 52.7 |
| 208 | 1228 | 29254 | 29273 | 53.1 | 50 | 3728 | 29358 | 29339 | 52.8 | 50 | 0.2 | 105 | 73.4 | 48.6 | 32 | 52.3 |
| 209 | 1229 | 29259 | 29278 | 52.6 | 50 | 3729 | 29358 | 29339 | 52.8 | 50 | 0.2 | 100 | 72.4 | 47 | 32 | 51.6 |
| 210 | 1230 | 1402 | 1422 | 50.2 | 42.9 | 3730 | 1773 | 1755 | 51.7 | 52.6 | 1.5 | 372 | 75.8 | 43.3 | 33 | 53.2 |
| 211 | 1231 | 12726 | 12746 | 51.3 | 47.6 | 3731 | 13326 | 13306 | 50.7 | 42.9 | 0.6 | 601 | 76.7 | 43.6 | 33 | 54 |
| 212 | 1232 | 4 | 22 | 52.3 | 52.6 | 3732 | 269 | 251 | 51.1 | 52.6 | 1.2 | 266 | 76.5 | 46.6 | 33 | 54 |
| 213 | 1233 | 19800 | 19817 | 50.4 | 50 | 3733 | 19923 | 19903 | 50.9 | 47.6 | 0.4 | 124 | 72.3 | 43.5 | 33 | 50.9 |
| 214 | 1234 | 2371 | 2389 | 50.3 | 47.4 | 3734 | 3082 | 3058 | 52.3 | 40 | 2 | 712 | 76.7 | 43.3 | 33 | 53.9 |
| 215 | 1235 | 3 | 21 | 53.4 | 52.6 | 3735 | 270 | 251 | 52.9 | 50 | 0.5 | 268 | 76.4 | 46.3 | 33 | 54.4 |
| 216 | 1236 | 9930 | 9949 | 52.2 | 50 | 3736 | 10183 | 10166 | 50.9 | 50 | 1.3 | 254 | 75.3 | 44.1 | 33 | 53.1 |
| 217 | 1237 | 19795 | 19814 | 50.4 | 45 | 3737 | 19923 | 19904 | 50.1 | 50 | 0.3 | 129 | 72.5 | 43.4 | 33 | 50.9 |
| 218 | 1238 | 8867 | 8887 | 52.3 | 47.6 | 3738 | 9365 | 9347 | 53 | 52.6 | 0.7 | 499 | 75.8 | 42.1 | 33 | 53.9 |
| 219 | 1239 | 2371 | 2389 | 50.3 | 47.4 | 3739 | 3055 | 3036 | 50.6 | 50 | 0.3 | 685 | 76.7 | 43.4 | 33 | 53.9 |
| 220 | 1240 | 19709 | 19730 | 51.3 | 40.9 | 3740 | 19921 | 19901 | 50.2 | 47.6 | 1.1 | 213 | 73.9 | 41.8 | 33 | 51.9 |
| 221 | 1241 | 9930 | 9949 | 52.2 | 50 | 3741 | 10183 | 10165 | 51.7 | 47.4 | 0.5 | 254 | 75.3 | 44.1 | 33 | 53.3 |
| 222 | 1242 | 2371 | 2389 | 50.3 | 47.4 | 3742 | 2747 | 2727 | 50 | 42.9 | 0.3 | 377 | 76.9 | 45.9 | 33 | 54 |
| 223 | 1243 | 24921 | 24938 | 50.4 | 50 | 3743 | 25182 | 25164 | 51.4 | 47.4 | 1 | 262 | 74.2 | 41.2 | 33 | 52.2 |
| 224 | 1244 | 18077 | 18099 | 54.4 | 47.8 | 3744 | 18443 | 18424 | 55.9 | 55 | 1.5 | 367 | 75.8 | 43.3 | 33 | 54.5 |
| 225 | 1245 | 25772 | 25793 | 52.4 | 40.9 | 3745 | 26183 | 26164 | 51 | 45 | 1.3 | 412 | 74.8 | 40.3 | 33 | 52.8 |
| 226 | 1246 | 25769 | 25786 | 50.3 | 50 | 3746 | 26183 | 26164 | 51 | 45 | 0.8 | 415 | 74.9 | 40.5 | 33 | 52.6 |
| 227 | 1247 | 25348 | 25366 | 51.2 | 47.4 | 3747 | 25548 | 25531 | 51.1 | 50 | 0.1 | 201 | 74.3 | 43.3 | 33 | 52.4 |
| 228 | 1248 | 12726 | 12746 | 51.3 | 47.6 | 3748 | 13323 | 13304 | 51.1 | 45 | 0.2 | 598 | 76.7 | 43.6 | 33 | 54.1 |
| 229 | 1249 | 8372 | 8390 | 50.7 | 47.4 | 3749 | 8928 | 8911 | 51.9 | 50 | 1.2 | 557 | 75.1 | 40 | 33 | 52.9 |
| 230 | 1250 | 2671 | 2692 | 52.1 | 40.9 | 3750 | 3189 | 3168 | 51 | 45.5 | 1.2 | 519 | 75.7 | 41.6 | 33 | 53.4 |
| 231 | 1251 | 25348 | 25365 | 50.4 | 50 | 3751 | 25548 | 25531 | 51.1 | 50 | 0.7 | 201 | 74.3 | 43.3 | 33 | 52.2 |
| 232 | 1252 | 19801 | 19819 | 53.2 | 52.6 | 3752 | 19923 | 19902 | 51.5 | 45.5 | 1.7 | 123 | 72.4 | 43.9 | 33 | 51.3 |
| 233 | 1253 | 27442 | 27461 | 51.5 | 40 | 3753 | 27546 | 27527 | 51.3 | 50 | 0.2 | 105 | 71.8 | 44.8 | 33 | 50.8 |
| 234 | 1254 | 8867 | 8887 | 52.3 | 47.6 | 3754 | 9312 | 9293 | 50.6 | 45 | 1.8 | 446 | 75.4 | 41.5 | 33 | 53 |
| 235 | 1255 | 2671 | 2692 | 52.1 | 40.9 | 3755 | 3056 | 3038 | 50.8 | 52.6 | 1.3 | 386 | 74.8 | 40.7 | 33 | 52.7 |
| 236 | 1256 | 13231 | 13251 | 50.1 | 42.9 | 3756 | 13547 | 13528 | 50.2 | 45 | 0.2 | 317 | 76.9 | 46.7 | 33 | 54 |
| 237 | 1257 | 9055 | 9079 | 52.8 | 40 | 3757 | 9310 | 9291 | 51.2 | 45 | 1.7 | 256 | 74.4 | 41.8 | 33 | 52.5 |
| 238 | 1258 | 28821 | 28838 | 50.3 | 50 | 3758 | 29298 | 29280 | 51.4 | 52.6 | 1.1 | 478 | 77 | 45.2 | 33 | 54.1 |
| 239 | 1259 | 9055 | 9079 | 52.8 | 40 | 3759 | 9253 | 9235 | 51.6 | 47.4 | 1.2 | 199 | 73.6 | 41.7 | 33 | 52.1 |
| 240 | 1260 | 23840 | 23863 | 55.2 | 45.8 | 3760 | 24050 | 24031 | 56.5 | 55 | 1.4 | 211 | 75 | 44.5 | 33 | 54.1 |
| 241 | 1261 | 18074 | 18093 | 50.3 | 45 | 3761 | 18233 | 18214 | 52 | 50 | 1.7 | 160 | 73.9 | 44.4 | 33 | 51.9 |
| 242 | 1262 | 27366 | 27384 | 52.2 | 52.6 | 3762 | 27674 | 27654 | 51.9 | 42.9 | 0.3 | 309 | 74.3 | 40.5 | 33 | 52.7 |
| 243 | 1263 | 28967 | 28989 | 53.7 | 47.8 | 3763 | 29301 | 29282 | 55.3 | 55 | 1.5 | 335 | 76.4 | 45.1 | 33 | 54.7 |
| 244 | 1264 | 27366 | 27384 | 52.2 | 52.6 | 3764 | 27674 | 27653 | 52.5 | 40.9 | 0.3 | 309 | 74.3 | 40.5 | 33 | 52.8 |
| 245 | 1265 | 28966 | 28988 | 55.3 | 52.2 | 3765 | 29301 | 29282 | 55.3 | 55 | 0.1 | 336 | 76.4 | 45.2 | 33 | 55.2 |
| 246 | 1266 | 18074 | 18094 | 51.1 | 42.9 | 3766 | 18233 | 18214 | 52 | 50 | 1 | 160 | 73.9 | 44.4 | 33 | 52.1 |
| 247 | 1267 | 28965 | 28984 | 52.9 | 55 | 3767 | 29298 | 29280 | 51.4 | 52.6 | 1.5 | 334 | 76.4 | 45.2 | 33 | 54 |
| 248 | 1268 | 18081 | 18099 | 51.2 | 52.6 | 3768 | 18233 | 18215 | 51.3 | 52.6 | 0.11 | 153 | 74 | 45.1 | 33 | 52.2 |
| 249 | 1269 | 18081 | 18099 | 51.2 | 52.6 | 3769 | 18233 | 18214 | 52 | 50 | 0.81 | 1531 | 74 | 45.1 | 33 | 52.2 |
| 250 | 1270 | 18081 | 18099 | 51.2 | 52.6 | 3770 | 18231 | 18210 | 52.2 | 45.5 | 1 | 151 | 73.6 | 44.4 | 33 | 52 |
| 251 | 1271 | 24480 | 245001 | 53.2 | 47.6 | 3771 | 24815 | 24791 | 54.5 | 40 | 1.3 | 336 | 75.6 | 43.2 | 33 | 54 |
| 252 | 1272 | 24481 | 24503 | 52.7 | 43.5 | 3772 | 24815 | 24791 | 54.5 | 40 | 1.8 | 335 | 75.5 | 43 | 33 | 53.8 |
| 253 | 1273 | 27367 | 27385 | 51.4 | 52.6 | 3773 | 27675 | 27656 | 50 | 40 | 1.4 | 309 | 74.3 | 40.5 | 33 | 52.1 |
| 254 | 1274 | 27367 | 27385 | 51.4 | 52.6 | 3774 | 27674 | 27654 | 51.9 | 42.9 | 0.5 | 308 | 74.4 | 40.6 | 33 | 52.6 |
| 255 | 1275 | 27367 | 27385 | 51.4 | 52.6 | 3775 | 27674 | 27653 | 52.5 | 40.9 | 1.1 | 308 | 74.4 | 40.6 | 33 | 52.6 |
| 256 | 1276 | 18081 | 18099 | 51.2 | 52.6 | 3776 | 18223 | 18206 | 51.8 | 50 | 0.6 | 143 | 73.2 | 44.1 | 33 | 51.7 |
| 257 | 1277 | 18080 | 18099 | 53 | 50 | 3777 | 18220 | 18202 | 54.8 | 52.6 | 1.9 | 141 | 73.1 | 44 | 33 | 52.2 |
| 258 | 1278 | 9933 | 9952 | 50.9 | 45 | 3778 | 10670 | 10649 | 51.3 | 40.9 | 0.5 | 738 | 75.7 | 40.8 | 33 | 53.4 |
| 259 | 1279 | 27665 | 27686 | 51.4 | 40.9 | 3779 | 28208 | 28190 | 51.7 | 52.6 | 0.4 | 544 | 75.1 | 40.1 | 33 | 53.4 |
| 260 | 1280 | 27665 | 27685 | 50.7 | 42.9 | 3780 | 28208 | 28190 | 51.7 | 52.6 | 1.1 | 544 | 75.1 | 40.1 | 33 | 52.9 |
| 261 | 1281 | 27442 | 27461 | 51.5 | 40 | 3781 | 27541 | 27522 | 50.1 | 45 | 1.4 | 100 | 71.2 | 44 | 33 | 50 |
| 262 | 1282 | 28821 | 28840 | 51.8 | 45 | 3782 | 29298 | 29280 | 51.4 | 52.6 | 0.4 | 478 | 77 | 45.2 | 33 | 54.4 |
| 263 | 1283 | 28821 | 28839 | 51.1 | 47.4 | 3783 | 29298 | 29280 | 51.4 | 52.6 | 0.3 | 478 | 77 | 45.2 | 33 | 54.3 |
| 264 | 1284 | 8868 | 8889 | 50.4 | 40.9 | 3784 | 9252 | 9235 | 50.1 | 50 | 0.3 | 385 | 75.1 | 41.3 | 34 | 52.7 |
| 265 | 1285 | 19800 | 19818 | 52.1 | 52.6 | 3785 | 19920 | 19899 | 50.2 | 40.9 | 2 | 121 | 71.9 | 43 | 34 | 50.5 |
| 266 | 1286 | 9055 | 9079 | 52.8 | 40 | 3786 | 9313 | 9293 | 52.1 | 47.6 | 0.7 | 259 | 74.6 | 42.1 | 34 | 52.9 |
| 267 | 1287 | 10142 | 10163 | 51.3 | 40.9 | 3787 | 10605 | 10588 | 51.1 | 50 | 0.2 | 464 | 74.9 | 40.1 | 34 | 52.8 |
| 268 | 1288 | 12726 | 12746 | 51.3 | 47.6 | 3788 | 13312 | 13294 | 51 | 52.6 | 0.3 | 587 | 76.6 | 43.6 | 34 | 54 |
| 269 | 1289 | 9055 | 90791 | 52.8 | 40 | 3789 | 9257 | 9237 | 52.2 | 42.9 | 0.7 | 203 | 73.5 | 41.4 | 34 | 52.2 |
| 270 | 1290 | 7876 | 78951 | 51.5 | 45 | 3790 | 8188 | 8169 | 50.5 | 45 | 1.1 | 313 | 75 | 42.2 | 34 | 52.8 |
| 271 | 1291 | 23843 | 23863 | 50.3 | 42.9 | 3791 | 24527 | 24507 | 51 | 42.9 | 0.7 | 685 | 76 | 41.8 | 34 | 53.4 |
| 272 | 1292 | 10247 | 10267 | 50.5 | 47.6 | 3792 | 10608 | 10589 | 51 | 50 | 0.5 | 362 | 74.6 | 40.3 | 34 | 52.4 |
| 273 | 1293 | 24179 | 24199 | 52.7 | 42.9 | 3793 | 24815 | 24791 | 54.5 | 40 | 1.8 | 637 | 75.8 | 41.3 | 34 | 53.9 |
| 274 | 1294 | 12236 | 12256 | 51.2 | 42.9 | 3794 | 12998 | 12979 | 50.1 | 45 | 1.1 | 763 | 76.4 | 42.5 | 34 | 53.6 |
| 275 | 1295 | 7869 | 7889 | 52.5 | 47.6 | 3795 | 8189 | 8169 | 52 | 47.6 | 0.5 | 321 | 75.3 | 42.7 | 34 | 53.4 |
| 276 | 1296 | 1402 | 1422 | 50.2 | 42.9 | 3796 | 2152 | 2133 | 50.7 | 45 | 0.5 | 751 | 76.7 | 43.1 | 34 | 53.8 |
| 277 | 1297 | 12233 | 12251 | 51.1 | 52.6 | 3797 | 12993 | 12975 | 51.4 | 47.4 | 0.2 | 761 | 76.5 | 42.6 | 34 | 54 |
| 278 | 1298 | 3033 | 3053 | 51.7 | 47.6 | 3798 | 3650 | 3631 | 53.1 | 50 | 1.4 | 618 | 76.4 | 42.9 | 34 | 54.1 |
| 279 | 1299 | 12233 | 12251 | 51.1 | 52.6 | 3799 | 12996 | 12977 | 50.2 | 40 | 0.9 | 764 | 76.4 | 42.4 | 34 | 53.7 |
| 280 | 1300 | 24483 | 24503 | 51 | 42.9 | 3800 | 24938 | 24921 | 50.4 | 50 | 0.6 | 456 | 75.6 | 41.9 | 34 | 53.1 |
| 281 | 1301 | 11541 | 11561 | 50.9 | 42.9 | 3801 | 12253 | 12235 | 50.1 | 52.6 | 0.8 | 713 | 76.2 | 42.1 | 34 | 53.5 |
| 282 | 1302 | 24622 | 24643 | 57.1 | 54.5 | 3802 | 25400 | 25379 | 56 | 50 | 1.1 | 779 | 75.7 | 40.7 | 34 | 54.9 |
| 283 | 1303 | 24622 | 24643 | 57.1 | 54.5 | 3803 | 25400 | 25378 | 56.4 | 47.8 | 0.6 | 779 | 75.7 | 40.7 | 34 | 55 |
| 284 | 1304 | 24630 | 24648 | 50.8 | 52.6 | 3804 | 25403 | 25385 | 51.1 | 47.4 | 0.3 | 774 | 75.7 | 40.6 | 34 | 53.3 |
| 285 | 1305 | 9929 | 9946 | 50 | 50 | 3805 | 10605 | 10588 | 51.1 | 50 | 1 | 677 | 75.8 | 41.2 | 34 | 53.2 |
| 286 | 1306 | 24633 | 24651 | 50.1 | 52.6 | 3806 | 25403 | 25385 | 51.1 | 47.4 | 1 | 771 | 75.6 | 40.5 | 34 | 53.1 |
| 287 | 1307 | 11541 | 11560 | 50.1 | 45 | 3807 | 12253 | 12235 | 50.1 | 52.6 | 0 | 713 | 76.2 | 42.1 | 34 | 53.5 |
| 288 | 1308 | 24635 | 24653 | 50.5 | 52.6 | 3808 | 25403 | 25385 | 51.1 | 47.4 | 0.7 | 769 | 75.6 | 40.4 | 34 | 53.2 |
| 289 | 1309 | 9933 | 9952 | 50.9 | 45 | 3809 | 10608 | 10589 | 51 | 50 | 0.1 | 676 | 75.8 | 41.1 | 34 | 53.4 |
| 290 | 1310 | 24921 | 24938 | 50.4 | 50 | 3810 | 25548 | 25531 | 51.1 | 50 | 0.7 | 628 | 75.6 | 40.9 | 34 | 53.1 |
| 291 | 1311 | 7725 | 7743 | 50.8 | 47.4 | 3811 | 8188 | 8169 | 50.5 | 45 | 0.4 | 464 | 75.6 | 41.8 | 34 | 53.2 |
| 292 | 1312 | 28547 | 28568 | 53.5 | 45.5 | 3812 | 29301 | 29282 | 55.3 | 55 | 1.8 | 755 | 78.5 | 47.5 | 34 | 56.1 |
| 293 | 1313 | 28547 | 28568 | 53.5 | 45.5 | 3813 | 29306 | 29288 | 53.5 | 52.6 | 0 | 760 | 78.5 | 47.5 | 34 | 56.1 |
| 294 | 1314 | 28548 | 28568 | 50.5 | 42.9 | 3814 | 29298 | 29280 | 51.4 | 52.6 | 0.9 | 751 | 78.4 | 47.4 | 34 | 55.2 |
| 295 | 1315 | 28546 | 28567 | 55.1 | 50 | 3815 | 29301 | 29282 | 55.3 | 55 | 0.2 | 756 | 78.5 | 47.6 | 34 | 56.6 |
| 296 | 1316 | 28547 | 28567 | 52.9 | 47.6 | 3816 | 29298 | 29280 | 51.4 | 52.6 | 1.5 | 752 | 78.5 | 47.5 | 34 | 55.5 |
| 297 | 1317 | 28546 | 28565 | 52.2 | 50 | 3817 | 29298 | 29280 | 51.4 | 52.6 | 0.8 | 753 | 78.5 | 47.5 | 34 | 55.5 |
| 298 | 1318 | 28546 | 28565 | 52.2 | 50 | 3818 | 29306 | 29288 | 53.5 | 52.6 | 1.3 | 761 | 78.5 | 47.6 | 34 | 55.7 |
| 299 | 1319 | 28396 | 28416 | 52.4 | 47.6 | 3819 | 28672 | 28654 | 50.6 | 52.6 | 1.8 | 277 | 78.6 | 51.6 | 34 | 55.3 |
| 300 | 1320 | 28396 | 28415 | 51.2 | 45 | 3820 | 28671 | 28652 | 52.8 | 55 | 1.6 | 276 | 78.6 | 51.4 | 34 | 55.4 |
| 301 | 1321 | 28396 | 28415 | 51.2 | 45 | 3821 | 28671 | 28653 | 50.2 | 52.6 | 1 | 276 | 78.6 | 51.4 | 34 | 55.2 |
| 302 | 1322 | 12976 | 12995 | 51.1 | 45 | 3822 | 13545 | 13527 | 50.3 | 52.6 | 0.8 | 570 | 77.4 | 45.6 | 34 | 54.4 |
| 303 | 1323 | 16551 | 16568 | 51.1 | 50 | 3823 | 16711 | 16691 | 51 | 42.9 | 0.1 | 161 | 73.8 | 44.1 | 34 | 52.1 |
| 304 | 1324 | 28395 | 28414 | 51.5 | 45 | 3824 | 28672 | 28654 | 50.6 | 52.6 | 0.9 | 278 | 78.6 | 51.4 | 34 | 55.3 |
| 305 | 1325 | 16555 | 16572 | 50.3 | 50 | 3825 | 16780 | 16760 | 51.4 | 42.9 | 1.1 | 226 | 73.6 | 40.7 | 34 | 51.7 |
| 306 | 1326 | 28394 | 28413 | 51.8 | 45 | 3826 | 28671 | 28652 | 52.8 | 55 | 1 | 278 | 78.6 | 51.4 | 34 | 55.6 |
| 307 | 1327 | 28395 | 28413 | 50.2 | 42.1 | 3827 | 28671 | 28653 | 50.2 | 52.6 | 0 | 277 | 78.5 | 51.3 | 34 | 55.1 |
| 308 | 1328 | 7728 | 7746 | 51.7 | 52.6 | 3828 | 8049 | 8032 | 50.4 | 50 | 1.3 | 322 | 74.9 | 41.6 | 34 | 52.6 |
| 309 | 1329 | 28394 | 28412 | 51.1 | 47.4 | 3829 | 28671 | 28652 | 52.8 | 55 | 1.7 | 278 | 78.6 | 51.4 | 34 | 55.4 |
| 310 | 1330 | 28394 | 28412 | 51.1 | 47.4 | 3830 | 28671 | 28653 | 50.2 | 52.6 | 0.8 | 278 | 78.6 | 51.4 | 34 | 55.2 |
| 311 | 1331 | 11543 | 11562 | 50.4 | 40 | 3831 | 12257 | 12237 | 51.3 | 47.6 | 0.9 | 715 | 76.2 | 42 | 34 | 53.5 |
| 312 | 1332 | 28393 | 28411 | 52.9 | 52.6 | 3832 | 28671 | 28652 | 52.8 | 55 | 0.1 | 279 | 78.6 | 51.6 | 34 | 56 |
| 313 | 1333 | 28394 | 28411 | 50.3 | 50 | 3833 | 28671 | 28653 | 50.2 | 52.6 | 0 | 278 | 78.6 | 51.4 | 34 | 55.2 |
| 314 | 1334 | 4255 | 4276 | 51.7 | 45.5 | 3834 | 4710 | 4691 | 50.2 | 45 | 1.5 | 456 | 75.1 | 40.8 | 34 | 52.8 |
| 315 | 1335 | 12975 | 12994 | 52.1 | 45 | 3835 | 13545 | 13526 | 52.9 | 55 | 0.8 | 571 | 77.4 | 45.5 | 34 | 54.9 |
| 316 | 1336 | 9930 | 9948 | 51.5 | 52.6 | 3836 | 10608 | 10589 | 51 | 50 | 0.5 | 679 | 75.8 | 41.2 | 34 | 53.5 |
| 317 | 1337 | 27665 | 27686 | 51.4 | 40.9 | 3837 | 28411 | 28393 | 52.9 | 52.6 | 1.6 | 747 | 76.8 | 43.5 | 34 | 54.3 |
| 318 | 1338 | 27665 | 27686 | 51.4 | 40.9 | 3838 | 28415 | 28396 | 51.2 | 45 | 0.2 | 751 | 76.8 | 43.4 | 34 | 54.2 |
| 319 | 1339 | 11541 | 11561 | 50.9 | 42.9 | 3839 | 12257 | 12237 | 51.3 | 47.6 | 0.5 | 717 | 76.2 | 42 | 34 | 53.7 |
| 320 | 1340 | 27665 | 27685 | 50.7 | 42.9 | 3840 | 28415 | 28396 | 51.2 | 45 | 0.5 | 751 | 76.8 | 43.4 | 34 | 54.1 |
| 321 | 1341 | 11543 | 11562 | 50.4 | 40 | 3841 | 12253 | 12235 | 50.1 | 52.6 | 0.3 | 711 | 76.2 | 42.1 | 34 | 53.5 |
| 322 | 1342 | 11545 | 11563 | 50.8 | 47.4 | 3842 | 12254 | 12236 | 50.5 | 47.4 | 0.2 | 710 | 76.2 | 42.1 | 34 | 53.6 |
| 323 | 1343 | 27436 | 27455 | 52.7 | 45 | 3843 | 27542 | 27522 | 50.9 | 42.9 | 1.8 | 107 | 72 | 44.9 | 34 | 50.8 |
| 324 | 1344 | 27436 | 27455 | 52.7 | 45 | 3844 | 27546 | 27527 | 51.3 | 50 | 1.3 | 111 | 72.7 | 45.9 | 34 | 51.4 |
| 325 | 1345 | 27389 | 27407 | 50.6 | 47.4 | 3845 | 27541 | 27522 | 50.1 | 45 | 0.5 | 153 | 73.2 | 43.1 | 34 | 51.4 |
| 326 | 1346 | 27389 | 27407 | 50.6 | 47.4 | 3846 | 27546 | 27527 | 51.3 | 50 | 0.7 | 158 | 73.5 | 43.7 | 34 | 51.8 |
| 327 | 1347 | 27369 | 27392 | 57.2 | 50 | 3847 | 27468 | 27446 | 57.7 | 47.8 | 0.5 | 100 | 71.2 | 44 | 34 | 52.1 |
| 328 | 1348 | 27367 | 27389 | 55 | 47.8 | 3848 | 27466 | 27446 | 56.8 | 52.4 | 1.8 | 100 | 71.6 | 45 | 34 | 51.7 |
| 329 | 1349 | 11541 | 11560 | 50.1 | 45 | 3849 | 12257 | 12237 | 51.3 | 47.6 | 1.2 | 717 | 76.2 | 42 | 34 | 53.5 |
| 330 | 1350 | 7725 | 7742 | 50 | 50 | 3850 | 8188 | 8169 | 50.5 | 45 | 0.4 | 464 | 75.6 | 41.8 | 34 | 53 |
| 331 | 1351 | 2223 | 2243 | 50.2 | 42.9 | 3851 | 2672 | 2653 | 51.6 | 50 | 1.4 | 450 | 77 | 45.3 | 34 | 54.1 |
| 332 | 1352 | 9930 | 9949 | 52.2 | 50 | 3852 | 10608 | 10589 | 51 | 50 | 1.2 | 679 | 75.8 | 41.2 | 34 | 53.5 |
| 333 | 1353 | 9934 | 9953 | 50.7 | 50 | 3853 | 10455 | 10435 | 50.5 | 42.9 | 0.3 | 522 | 75.3 | 40.6 | 34 | 52.9 |
| 334 | 1354 | 2223 | 2243 | 50.2 | 42.9 | 3854 | 2672 | 2654 | 50.9 | 52.6 | 0.7 | 450 | 77 | 45.3 | 34 | 54.1 |
| 335 | 1355 | 3797 | 3815 | 50.9 | 47.4 | 3855 | 4445 | 4425 | 50.6 | 42.9 | 0.4 | 649 | 75.4 | 40.4 | 34 | 53.1 |
| 336 | 1356 | 9934 | 9953 | 50.7 | 50 | 3856 | 10455 | 10434 | 51.1 | 40.9 | 0.4 | 522 | 75.3 | 40.6 | 34 | 53 |
| 337 | 1357 | 18074 | 18093 | 50.3 | 45 | 3857 | 18697 | 18679 | 51.9 | 52.6 | 1.5 | 624 | 76.2 | 42.5 | 34 | 53.6 |
| 338 | 1358 | 12976 | 12994 | 50.3 | 47.4 | 3858 | 13545 | 13527 | 50.3 | 52.6 | 0.1 | 570 | 77.4 | 45.6 | 34 | 54.4 |
| 339 | 1359 | 12040 | 12057 | 50.6 | 50 | 3859 | 12498 | 12480 | 50 | 47.4 | 0.6 | 459 | 76.3 | 43.6 | 34 | 53.5 |
| 340 | 1360 | 12040 | 12057 | 50.6 | 50 | 3860 | 12257 | 12237 | 51.3 | 47.6 | 0.7 | 218 | 75.4 | 45.4 | 34 | 53.1 |
| 341 | 1361 | 11540 | 11557 | 50.4 | 50 | 3861 | 12257 | 12237 | 51.3 | 47.6 | 0.9 | 718 | 76.2 | 42.1 | 34 | 53.6 |
| 342 | 1362 | 12975 | 12993 | 51.4 | 47.4 | 3862 | 13545 | 13526 | 52.9 | 55 | 1.5 | 571 | 77.4 | 45.5 | 34 | 54.7 |
| 343 | 1363 | 12975 | 12993 | 51.4 | 47.4 | 3863 | 13545 | 13527 | 50.3 | 52.6 | 1.1 | 571 | 77.4 | 45.5 | 34 | 54.4 |
| 344 | 1364 | 11540 | 11560 | 53.2 | 47.6 | 3864 | 11983 | 11965 | 53 | 52.6 | 0.2 | 444 | 75.1 | 40.8 | 34 | 53.6 |
| 345 | 1365 | 12040 | 12057 | 50.6 | 50 | 3865 | 12253 | 12235 | 50.1 | 52.6 | 0.5 | 214 | 75.5 | 45.8 | 34 | 53 |
| 346 | 1366 | 12976 | 12995 | 51.1 | 45 | 3866 | 13545 | 13526 | 52.9 | 55 | 1.8 | 570 | 77.4 | 45.6 | 34 | 54.6 |
| 347 | 1367 | 13039 | 13057 | 51.1 | 52.6 | 3867 | 13314 | 13297 | 51 | 50 | 0.1 | 276 | 75.7 | 44.6 | 34 | 53.4 |
| 348 | 1368 | 27361 | 27380 | 52.4 | 55 | 3868 | 27463 | 27444 | 51.6 | 40 | 0.8 | 103 | 71.7 | 44.7 | 34 | 50.7 |
| 349 | 1369 | 27361 | 27380 | 52.4 | 55 | 3869 | 27463 | 27445 | 50.8 | 42.1 | 1.6 | 103 | 71.7 | 44.7 | 34 | 50.5 |
| 350 | 1370 | 27361 | 27380 | 52.4 | 55 | 3870 | 27464 | 27446 | 51.7 | 47.4 | 0.7 | 104 | 71.9 | 45.2 | 34 | 51 |
| 351 | 1371 | 25348 | 25365 | 50.4 | 50 | 3871 | 25645 | 25626 | 50.8 | 45 | 0.4 | 298 | 74.6 | 41.3 | 34 | 52.4 |
| 352 | 1372 | 9922 | 9941 | 51.3 | 50 | 3872 | 10449 | 10431 | 50.9 | 47.4 | 0.3 | 528 | 75.4 | 40.9 | 34 | 53.2 |
| 353 | 1373 | 13039 | 13057 | 51.1 | 52.6 | 3873 | 13323 | 13304 | 51.1 | 45 | 0 | 285 | 75.8 | 44.6 | 34 | 53.5 |
| 354 | 1374 | 12235 | 12253 | 50.1 | 52.6 | 3874 | 12412 | 12392 | 50 | 42.9 | 0.1 | 178 | 73.2 | 41.6 | 34 | 51.3 |
| 355 | 1375 | 3016 | 3036 | 50.2 | 42.9 | 3875 | 3185 | 3164 | 51 | 45.5 | 0.7 | 170 | 74.5 | 45.3 | 34 | 52.3 |
| 356 | 1376 | 13039 | 13057 | 51.1 | 52.6 | 3876 | 13326 | 13306 | 50.7 | 42.9 | 0.4 | 288 | 75.8 | 44.4 | 34 | 53.4 |
| 357 | 1377 | 7869 | 7889 | 52.5 | 47.6 | 3877 | 8050 | 8032 | 52 | 52.6 | 0.5 | 182 | 73.8 | 42.9 | 34 | 52.3 |
| 358 | 1378 | 26421 | 26441 | 51.5 | 42.9 | 3878 | 26655 | 26634 | 50.6 | 40.9 | 0.9 | 235 | 74.1 | 41.7 | 34 | 52.2 |
| 359 | 1379 | 26421 | 26441 | 51.5 | 42.9 | 3879 | 26657 | 26639 | 50.8 | 47.4 | 0.7 | 237 | 74.2 | 41.8 | 34 | 52.3 |
| 360 | 1380 | 26040 | 26061 | 56.4 | 54.5 | 3880 | 26183 | 26159 | 54.9 | 40 | 1.5 | 144 | 72 | 41 | 34 | 52 |
| 361 | 1381 | 26040 | 26061 | 56.4 | 54.5 | 3881 | 26183 | 26160 | 54.5 | 41.7 | 2 | 144 | 72 | 41 | 34 | 51.9 |
| 362 | 1382 | 26040 | 26061 | 56.4 | 54.5 | 3882 | 26184 | 26161 | 55.1 | 41.7 | 1.3 | 145 | 71.9 | 40.7 | 34 | 52 |
| 363 | 1383 | 12373 | 12391 | 50.8 | 47.4 | 3883 | 12724 | 12705 | 52.4 | 55 | 1.6 | 352 | 75.6 | 42.9 | 34 | 53.2 |
| 364 | 1384 | 26040 | 26061 | 56.4 | 54.5 | 3884 | 26589 | 26569 | 54.7 | 47.6 | 1.7 | 550 | 75.1 | 40 | 34 | 54.1 |
| 365 | 1385 | 26039 | 26058 | 54 | 55 | 3885 | 26183 | 26159 | 54.9 | 40 | 0.9 | 145 | 71.9 | 40.7 | 34 | 51.7 |
| 366 | 1386 | 26039 | 26058 | 54 | 55 | 3886 | 26183 | 26160 | 54.5 | 41.7 | 0.4 | 145 | 71.9 | 40.7 | 34 | 51.7 |
| 367 | 1387 | 26039 | 26058 | 54 | 55 | 3887 | 26183 | 26161 | 54 | 43.5 | 0 | 145 | 71.9 | 40.7 | 34 | 51.7 |
| 368 | 1388 | 26039 | 26058 | 54 | 55 | 3888 | 26184 | 26163 | 53 | 40.9 | 1 | 146 | 71.8 | 40.4 | 34 | 51.3 |
| 369 | 1389 | 26039 | 26057 | 52.6 | 52.6 | 3889 | 26174 | 26153 | 51 | 40.9 | 1.6 | 136 | 71.8 | 41.2 | 34 | 50.7 |
| 370 | 1390 | 10246 | 10266 | 50.4 | 47.6 | 3890 | 10605 | 10588 | 51.1 | 50 | 0.6 | 360 | 74.5 | 40.3 | 34 | 52.4 |
| 371 | 1391 | 3234 | 3254 | 51.1 | 47.6 | 3891 | 3497 | 3478 | 51.3 | 50 | 0.2 | 264 | 74.3 | 41.3 | 34 | 52.4 |
| 372 | 1392 | 26039 | 26057 | 52.6 | 52.6 | 3892 | 26183 | 26162 | 52.81 | 45.5 | 0.2 | 145 | 71.9 | 40.7 | 34 | 51.2 |
| 373 | 1393 | 11540 | 11557 | 50.4 | 50 | 3893 | 12253 | 12235 | 50.1 | 52.6 | 0.3 | 714 | 76.2 | 42.2 | 34 | 53.5 |
| 374 | 1394 | 3234 | 3254 | 51.1 | 47.6 | 3894 | 3500 | 3481 | 51.2 | 50 | 0.1 | 267 | 74.3 | 41.2 | 34 | 52.4 |
| 375 | 1395 | 3794 | 3812 | 52.9 | 52.6 | 3895 | 4445 | 4424 | 51.3 | 40.9 | 1.6 | 652 | 75.5 | 40.5 | 34 | 53.3 |
| 376 | 1396 | 3794 | 3812 | 52.9 | 52.6 | 3896 | 4446 | 4425 | 51.8 | 45.5 | 1.1 | 653 | 75.5 | 40.6 | 34 | 53.5 |
| 377 | 1397 | 3234 | 3254 | 51.1 | 47.6 | 3897 | 3646 | 3625 | 52 | 40.9 | 1 | 413 | 75.1 | 41.2 | 34 | 53 |
| 378 | 1398 | 3234 | 3254 | 51.1 | 47.6 | 3898 | 3647 | 3628 | 50.6 | 45 | 0.5 | 414 | 75.2 | 41.3 | 34 | 52.9 |
| 379 | 1399 | 3226 | 3245 | 51.7 | 55 | 3899 | 3497 | 3478 | 51.3 | 50 | 0.4 | 272 | 74.6 | 41.9 | 34 | 52.7 |
| 380 | 1400 | 3797 | 3815 | 50.9 | 47.4 | 3900 | 4444 | 4424 | 50.6 | 42.9 | 0.4 | 648 | 75.4 | 40.4 | 34 | 53.1 |
| 381 | 1401 | 3226 | 3245 | 51.7 | 55 | 3901 | 3500 | 3481 | 51.2 | 50 | 0.5 | 275 | 74.6 | 41.8 | 34 | 52.7 |
| 382 | 1402 | 16366 | 16384 | 50.3 | 52.6 | 3902 | 16780 | 16760 | 51.4 | 42.9 | 1.1 | 415 | 75.1 | 41 | 34 | 52.7 |
| 383 | 1403 | 25782 | 25806 | 53.5 | 40 | 3903 | 26183 | 26161 | 54 | 43.5 | 0.5 | 402 | 74.7 | 40.3 | 34 | 53.5 |
| 384 | 1404 | 16366 | 16385 | 52.9 | 55 | 3904 | 16780 | 16760 | 51.4 | 42.9 | 1.4 | 415 | 75.1 | 41 | 34 | 53.1 |
| 385 | 1405 | 16367 | 16386 | 51.4 | 50 | 3905 | 16781 | 16761 | 51.3 | 47.6 | 0.1 | 415 | 75.1 | 41 | 34 | 53 |
| 386 | 1406 | 12236 | 12256 | 51.2 | 42.9 | 3906 | 12992 | 12974 | 51.2 | 52.6 | 0 | 757 | 76.5 | 42.5 | 34 | 54 |
| 387 | 1407 | 16367 | 16386 | 51.4 | 50 | 3907 | 16777 | 16758 | 51.5 | 50 | 0.1 | 411 | 75 | 40.9 | 34 | 53 |
| 388 | 1408 | 16367 | 16386 | 51.4 | 50 | 3908 | 16711 | 16691 | 51 | 42.9 | 0.3 | 345 | 75.2 | 42 | 34 | 53 |
| 389 | 1409 | 3226 | 3245 | 51.7 | 55 | 3909 | 3503 | 3484 | 51.5 | 50 | 0.3 | 278 | 74.7 | 42.1 | 34 | 52.9 |
| 390 | 1410 | 16548 | 16566 | 54.9 | 52.6 | 3910 | 16782 | 16760 | 54.3 | 43.5 | 0.6 | 235 | 74 | 41.3 | 34 | 53.2 |
| 391 | 1411 | 16549 | 16567 | 54.9 | 52.6 | 3911 | 16782 | 16760 | 54.3 | 43.5 | 0.6 | 234 | 74 | 41.5 | 34 | 53.2 |
| 392 | 1412 | 25354 | 25372 | 50.9 | 52.6 | 3912 | 25645 | 25626 | 50.8 | 45 | 0.2 | 292 | 74.4 | 41.1 | 34 | 52.4 |
| 393 | 1413 | 16551 | 16568 | 51.1 | 50 | 3913 | 17038 | 17021 | 50.7 | 50 | 0.4 | 488 | 75.8 | 42.2 | 34 | 53.4 |
| 394 | 1414 | 25348 | 25366 | 51.2 | 47.4 | 3914 | 25645 | 25626 | 50.8 | 45 | 0.4 | 298 | 74.6 | 41.3 | 34 | 52.5 |
| 395 | 1415 | 16551 | 16568 | 51.1 | 50 | 3915 | 16780 | 16760 | 51.4 | 42.9 | 0.3 | 230 | 73.9 | 41.3 | 34 | 52.2 |
| 396 | 1416 | 7725 | 7743 | 50.8 | 47.4 | 3916 | 8049 | 8032 | 50.4 | 50 | 0.5 | 325 | 74.9 | 41.5 | 34 | 52.6 |
| 397 | 1417 | 29200 | 29224 | 54.2 | 40 | 3917 | 29299 | 29280 | 53.9 | 55 | 0.3 | 100 | 72.8 | 48 | 34 | 52.3 |
| 398 | 1418 | 29200 | 29224 | 54.2 | 40 | 3918 | 29301 | 29282 | 55.3 | 55 | 1.1 | 102 | 73 | 48 | 34 | 52.4 |
| 399 | 1419 | 29200 | 29223 | 53.7 | 41.7 | 3919 | 29299 | 29280 | 53.9 | 55 | 0.2 | 100 | 72.8 | 48 | 34 | 52.2 |
| 400 | 1420 | 29200 | 29223 | 53.7 | 41.7 | 3920 | 29301 | 29282 | 55.3 | 55 | 1.6 | 102 | 73 | 48 | 34 | 52.3 |
| 401 | 1421 | 29199 | 29222 | 54.6 | 41.7 | 3921 | 29301 | 29282 | 55.3 | 55 | 0.7 | 103 | 72.9 | 47.6 | 34 | 52.5 |
| 402 | 1422 | 29200 | 29222 | 53.2 | 43.5 | 3922 | 29299 | 29280 | 53.9 | 55 | 0.7 | 100 | 72.8 | 48 | 34 | 52 |
| 403 | 1423 | 29199 | 29221 | 54.1 | 43.5 | 3923 | 29301 | 29282 | 55.3 | 55 | 1.2 | 103 | 72.9 | 47.6 | 34 | 52.3 |
| 404 | 1424 | 29200 | 29221 | 52.6 | 45.5 | 3924 | 29299 | 29280 | 53.9 | 55 | 1.3 | 100 | 72.8 | 48 | 34 | 51.9 |
| 405 | 1425 | 18074 | 18093 | 50.3 | 45 | 3925 | 18239 | 18220 | 50 | 45 | 0.3 | 166 | 73.9 | 44 | 34 | 51.8 |
| 406 | 1426 | 18074 | 18093 | 50.3 | 45 | 3926 | 18238 | 18219 | 50.3 | 45 | 0 | 165 | 74 | 44.2 | 34 | 51.9 |
| 407 | 1427 | 1402 | 1426 | 54.1 | 40 | 3927 | 1774 | 1755 | 53.1 | 50 | 1 | 373 | 75.8 | 43.2 | 34 | 54.1 |
| 408 | 1428 | 18074 | 18094 | 51.1 | 42.9 | 3928 | 18697 | 18679 | 51.9 | 52.6 | 0.8 | 624 | 76.2 | 42.5 | 34 | 53.8 |
| 409 | 1429 | 18074 | 18094 | 51.1 | 42.9 | 3929 | 18239 | 18220 | 50 | 45 | 1 | 166 | 73.9 | 44 | 34 | 51.8 |
| 410 | 1430 | 18074 | 18094 | 51.1 | 42.9 | 3930 | 18238 | 18219 | 50.3 | 45 | 0.8 | 165 | 74 | 44.2 | 34 | 51.9 |
| 411 | 1431 | 3226 | 3245 | 51.7 | 55 | 3931 | 3504 | 3485 | 50.4 | 45 | 1.3 | 279 | 74.7 | 41.9 | 34 | 52.5 |
| 412 | 1432 | 18081 | 18099 | 51.2 | 52.6 | 3932 | 18662 | 18641 | 50.4 | 40.9 | 0.7 | 582 | 76.3 | 42.8 | 34 | 53.6 |
| 413 | 1433 | 7725 | 7742 | 50 | 50 | 3933 | 8049 | 8032 | 50.4 | 50 | 0.3 | 325 | 74.9 | 41.5 | 34 | 52.5 |
| 414 | 1434 | 29182 | 29205 | 54.6 | 41.7 | 3934 | 29301 | 29282 | 55.3 | 55 | 0.7 | 120 | 73.4 | 46.7 | 34 | 52.9 |
| 415 | 1435 | 4255 | 4276 | 51.7 | 45.5 | 3935 | 4711 | 4692 | 51.2 | 45 | 0.5 | 457 | 75.1 | 40.7 | 34 | 53 |
| 416 | 1436 | 29183 | 29204 | 50.4 | 40.9 | 3936 | 29298 | 29280 | 51.4 | 52.6 | 1.1 | 116 | 72.8 | 45.7 | 34 | 51.2 |
| 417 | 1437 | 3225 | 3243 | 50.9 | 52.6 | 3937 | 3497 | 3478 | 51.3 | 50 | 0.4 | 273 | 74.7 | 42.1 | 34 | 52.7 |
| 418 | 1438 | 29181 | 29202 | 53.9 | 45.5 | 3938 | 29301 | 29282 | 55.3 | 55 | 1.4 | 121 | 73.6 | 47.1 | 34 | 52.8 |
| 419 | 1439 | 29182 | 29202 | 51.2 | 42.9 | 3939 | 29298 | 29280 | 51.4 | 52.6 | 0.2 | 117 | 73.1 | 46.2 | 34 | 51.6 |
| 420 | 1440 | 29180 | 29199 | 50.1 | 40 | 3940 | 29298 | 29280 | 51.4 | 52.6 | 1.3 | 119 | 73.2 | 46.2 | 34 | 51.4 |
| 421 | 1441 | 28970 | 28993 | 53.3 | 41.7 | 3941 | 29301 | 29282 | 55.3 | 55 | 1.9 | 332 | 76.1 | 44.6 | 34 | 54.4 |
| 422 | 1442 | 28971 | 28993 | 51.9 | 43.5 | 3942 | 29298 | 29280 | 51.4 | 52.6 | 0.5 | 328 | 76.1 | 44.5 | 34 | 53.8 |
| 423 | 1443 | 4255 | 4276 | 51.7 | 45.5 | 3943 | 4711 | 4693 | 50.4 | 47.4 | 1.3 | 457 | 75.1 | 40.7 | 34 | 52.8 |
| 424 | 1444 | 12976 | 12996 | 51.8 | 42.9 | 3944 | 13545 | 13526 | 52.9 | 55 | 1.1 | 570 | 77.4 | 45.6 | 34 | 54.8 |
| 425 | 1445 | 28968 | 28989 | 51.5 | 45.5 | 3945 | 29306 | 29288 | 53.5 | 52.6 | 2 | 339 | 76.3 | 44.8 | 34 | 54 |
| 426 | 1446 | 3225 | 3243 | 50.9 | 52.6 | 3946 | 3500 | 3481 | 51.2 | 50 | 0.3 | 276 | 74.7 | 42 | 34 | 52.6 |
| 427 | 1447 | 3225 | 3243 | 50.9 | 52.6 | 3947 | 3503 | 3484 | 51.5 | 50 | 0.6 | 279 | 74.8 | 42.3 | 34 | 52.7 |
| 428 | 1448 | 3225 | 3243 | 50.9 | 52.6 | 3948 | 3504 | 3485 | 50.4 | 45 | 0.5 | 280 | 74.8 | 42.1 | 34 | 52.6 |
| 429 | 1449 | 28939 | 28961 | 55.2 | 47.8 | 3949 | 29301 | 29282 | 55.3 | 55 | 0.1 | 363 | 76.6 | 45.2 | 34 | 55.3 |
| 430 | 1450 | 28941 | 28961 | 51.6 | 42.9 | 3950 | 29306 | 29288 | 53.5 | 52.6 | 1.8 | 366 | 76.4 | 44.8 | 34 | 54.1 |
| 431 | 1451 | 8867 | 8886 | 50.7 | 50 | 3951 | 9252 | 9235 | 50.1 | 50 | 0.6 | 386 | 75.1 | 41.5 | 34 | 52.7 |
| 432 | 1452 | 28939 | 28960 | 54.7 | 50 | 3952 | 29301 | 29282 | 55.3 | 55 | 0.6 | 363 | 76.6 | 45.2 | 34 | 55.1 |
| 433 | 1453 | 28940 | 28960 | 52.4 | 47.6 | 3953 | 29306 | 29288 | 53.5 | 52.6 | 1 | 367 | 76.5 | 45 | 34 | 54.4 |
| 434 | 1454 | 28941 | 28960 | 50.9 | 45 | 3954 | 29298 | 29280 | 51.4 | 52.6 | 0.5 | 358 | 76.3 | 44.7 | 34 | 53.8 |
| 435 | 1455 | 3360 | 3380 | 51.4 | 42.9 | 3955 | 3494 | 3473 | 50.4 | 40.9 | 1 | 135 | 73.7 | 45.9 | 34 | 51.8 |
| 436 | 1456 | 19709 | 19730 | 51.3 | 40.9 | 3956 | 19916 | 19895 | 50.2 | 40.9 | 1 | 208 | 73.6 | 41.3 | 34 | 51.7 |
| 437 | 1457 | 12373 | 12391 | 50.8 | 47.4 | 3957 | 12994 | 12976 | 50.3 | 47.4 | 0.4 | 622 | 76.4 | 42.9 | 34 | 53.7 |
| 438 | 1458 | 19794 | 19813 | 50 | 50 | 3958 | 19921 | 19900 | 51.8 | 45.5 | 1.8 | 128 | 72.6 | 43.8 | 34 | 50.9 |
| 439 | 1459 | 3361 | 3381 | 50.5 | 42.9 | 3959 | 3494 | 3473 | 50.4 | 40.9 | 0.1 | 134 | 73.8 | 46.3 | 34 | 51.9 |
| 440 | 1460 | 12234 | 12252 | 50.6 | 47.4 | 3960 | 12992 | 12974 | 51.2 | 52.6 | 0.6 | 759 | 76.5 | 42.6 | 34 | 53.8 |
| 441 | 1461 | 12234 | 12252 | 50.6 | 47.4 | 3961 | 12994 | 12976 | 50.3 | 47.4 | 0.2 | 761 | 76.4 | 42.4 | 34 | 53.7 |
| 442 | 1462 | 3034 | 3053 | 50.3 | 50 | 3962 | 3647 | 3628 | 50.6 | 45 | 0.3 | 614 | 76.4 | 42.8 | 34 | 53.6 |
| 443 | 1463 | 8867 | 8887 | 52.3 | 47.6 | 3963 | 9254 | 9236 | 50.6 | 47.4 | 1.7 | 388 | 75.1 | 41.2 | 34 | 52.8 |
| 444 | 1464 | 12726 | 12746 | 51.3 | 47.6 | 3964 | 12994 | 12976 | 50.3 | 47.4 | 1 | 269 | 75.1 | 43.1 | 34 | 52.8 |
| 445 | 1465 | 12234 | 12252 | 50.6 | 47.4 | 3965 | 12998 | 12979 | 50.1 | 45 | 0.5 | 765 | 76.4 | 42.5 | 34 | 53.6 |
| 446 | 1466 | 9926 | 9944 | 50.5 | 52.6 | 3966 | 10605 | 10588 | 51.1 | 50 | 0.6 | 680 | 75.8 | 41.2 | 34 | 53.3 |
| 447 | 1467 | 3034 | 3053 | 50.3 | 50 | 3967 | 3646 | 3625 | 52 | 40.9 | 1.7 | 613 | 76.3 | 42.7 | 34 | 53.6 |
| 448 | 1468 | 12977 | 12996 | 50.2 | 40 | 3968 | 13545 | 13527 | 50.3 | 52.6 | 0 | 569 | 77.4 | 45.5 | 34 | 54.3 |
| 449 | 1469 | 19799 | 19817 | 52.2 | 52.6 | 3969 | 19909 | 19885 | 52.5 | 40 | 0.3 | 111 | 71.6 | 43.2 | 34 | 50.8 |
| 450 | 1470 | 8867 | 8887 | 52.3 | 47.6 | 3970 | 9246 | 9226 | 50.5 | 42.9 | 1.8 | 380 | 75 | 41.1 | 34 | 52.7 |
| 451 | 1471 | 8867 | 8887 | 52.3 | 47.6 | 3971 | 9342 | 9323 | 52.1 | 50 | 0.3 | 476 | 75.7 | 42 | 35 | 53.7 |
| 452 | 1472 | 10141 | 10160 | 51 | 45 | 3972 | 10608 | 10589 | 51 | 50 | 0 | 468 | 74.9 | 40.2 | 35 | 52.8 |
| 453 | 1473 | 3192 | 3213 | 51.8 | 45.5 | 3973 | 3494 | 3473 | 50.4 | 40.9 | 1.4 | 303 | 74.9 | 41.9 | 35 | 52.6 |
| 454 | 1474 | 3360 | 3379 | 50.7 | 45 | 3974 | 3647 | 3628 | 50.6 | 45 | 0.1 | 288 | 75.5 | 43.8 | 35 | 53.1 |
| 455 | 1475 | 27367 | 27385 | 51.4 | 52.6 | 3975 | 27566 | 27546 | 50.7 | 47.6 | 0.7 | 200 | 74.8 | 44.5 | 35 | 52.7 |
| 456 | 1476 | 10250 | 10274 | 51.6 | 40 | 3976 | 10605 | 10588 | 51.1 | 50 | 0.5 | 356 | 74.6 | 40.4 | 35 | 52.6 |
| 457 | 1477 | 27367 | 27385 | 51.4 | 52.6 | 3977 | 27568 | 27548 | 50.2 | 42.9 | 1.2 | 202 | 74.6 | 44.1 | 35 | 52.4 |
| 458 | 1478 | 27367 | 27385 | 51.4 | 52.6 | 3978 | 27571 | 27551 | 51.4 | 42.9 | 0 | 205 | 74.6 | 43.9 | 35 | 52.7 |
| 459 | 1479 | 8867 | 8887 | 52.3 | 47.6 | 3979 | 9376 | 9355 | 51 | 40.9 | 1.3 | 510 | 75.7 | 41.8 | 35 | 53.4 |
| 460 | 1480 | 27367 | 27385 | 51.4 | 52.6 | 3980 | 27576 | 27555 | 51 | 40.9 | 0.4 | 210 | 74.8 | 44.3 | 35 | 52.8 |
| 461 | 1481 | 27367 | 27385 | 51.4 | 52.6 | 3981 | 27579 | 27558 | 51.1 | 40.9 | 0.3 | 213 | 75 | 44.6 | 35 | 52.9 |
| 462 | 1482 | 18704 | 18724 | 50.8 | 47.6 | 3982 | 19215 | 19194 | 50.2 | 40.9 | 0.5 | 512 | 75.5 | 41.2 | 35 | 53 |
| 463 | 1483 | 18704 | 18724 | 50.8 | 47.6 | 3983 | 19217 | 19196 | 50.2 | 40.9 | 0.5 | 514 | 75.5 | 41.2 | 35 | 53 |
| 464 | 1484 | 18696 | 18715 | 51.7 | 50 | 3984 | 19215 | 19194 | 50.2 | 40.9 | 1.5 | 520 | 75.6 | 41.3 | 35 | 53.1 |
| 465 | 1485 | 27365 | 27384 | 52.6 | 50 | 3985 | 27464 | 27443 | 54 | 45.5 | 1.4 | 100 | 70.8 | 43 | 35 | 50.4 |
| 466 | 1486 | 18696 | 18715 | 51.7 | 50 | 3986 | 19217 | 19196 | 50.2 | 40.9 | 1.5 | 522 | 75.6 | 41.4 | 35 | 53.1 |
| 467 | 1487 | 3361 | 3381 | 50.5 | 42.9 | 3987 | 3646 | 3625 | 52 | 40.9 | 1.5 | 286 | 75.5 | 43.7 | 35 | 53.1 |
| 468 | 1488 | 3361 | 3381 | 50.5 | 42.9 | 3988 | 3647 | 3628 | 50.6 | 45 | 0.1 | 287 | 75.6 | 43.9 | 35 | 53.1 |
| 469 | 1489 | 3782 | 3801 | 51.3 | 50 | 3989 | 4445 | 4425 | 50.6 | 42.9 | 0.7 | 664 | 75.5 | 40.5 | 35 | 53.1 |
| 470 | 1490 | 13039 | 13058 | 51.8 | 50 | 3990 | 13155 | 13137 | 52.1 | 52.6 | 0.3 | 117 | 73.4 | 47 | 35 | 52 |
| 471 | 1491 | 3782 | 3801 | 51.3 | 50 | 3991 | 4444 | 4424 | 50.6 | 42.9 | 0.7 | 663 | 75.5 | 40.6 | 35 | 53.1 |
| 472 | 1492 | 13040 | 13059 | 50.9 | 50 | 3992 | 13747 | 13726 | 50.8 | 40.9 | 0.1 | 708 | 76.6 | 43.1 | 35 | 54 |
| 473 | 1493 | 2223 | 2243 | 50.2 | 42.9 | 3993 | 2747 | 2727 | 50 | 42.9 | 0.2 | 525 | 76.9 | 44.6 | 35 | 53.9 |
| 474 | 1494 | 9929 | 9946 | 50 | 50 | 3994 | 10449 | 10431 | 50.9 | 47.4 | 0.9 | 521 | 75.4 | 40.9 | 35 | 52.9 |
| 475 | 1495 | 18077 | 18097 | 51.5 | 47.6 | 3995 | 18702 | 18685 | 50.2 | 50 | 1.4 | 626 | 76.2 | 42.3 | 35 | 53.5 |
| 476 | 1496 | 3360 | 3379 | 50.7 | 45 | 3996 | 3646 | 3625 | 52 | 40.9 | 1.3 | 287 | 75.4 | 43.6 | 35 | 53.1 |
| 477 | 1497 | 26708 | 26731 | 54.2 | 41.7 | 3997 | 27463 | 27443 | 52.7 | 42.9 | 1.5 | 756 | 75.9 | 41.1 | 35 | 54 |
| 478 | 1498 | 26708 | 26731 | 54.2 | 41.7 | 3998 | 27464 | 27444 | 53 | 42.9 | 1.2 | 757 | 75.9 | 41.2 | 35 | 54.1 |
| 479 | 1499 | 26708 | 26731 | 54.2 | 41.7 | 3999 | 27464 | 27445 | 52.4 | 45 | 1.8 | 757 | 75.9 | 41.2 | 35 | 54 |
| 480 | 1500 | 4 | 22 | 52.3 | 52.6 | 4000 | 713 | 695 | 50.7 | 47.4 | 1.6 | 710 | 79 | 49 | 35 | 55.7 |
| 481 | 1501 | 26708 | 26727 | 50 | 45 | 4001 | 27462 | 27443 | 51.4 | 45 | 1.3 | 755 | 75.9 | 41.2 | 35 | 53.2 |
| 482 | 1502 | 3360 | 3380 | 51.4 | 42.9 | 4002 | 3646 | 3625 | 52 | 40.9 | 0.6 | 287 | 75.4 | 43.6 | 35 | 53.3 |
| 483 | 1503 | 26708 | 26727 | 50 | 45 | 4003 | 27463 | 27445 | 50.8 | 42.1 | 0.8 | 756 | 75.9 | 41.1 | 35 | 53.2 |
| 484 | 1504 | 988 | 1006 | 52.2 | 52.6 | 4004 | 1493 | 1474 | 50.8 | 45 | 1.5 | 506 | 76.5 | 43.7 | 35 | 53.9 |
| 485 | 1505 | 12352 | 12375 | 52.9 | 41.7 | 4005 | 12993 | 12975 | 51.4 | 47.4 | 1.5 | 642 | 76.5 | 43 | 35 | 54 |
| 486 | 1506 | 3360 | 3380 | 51.4 | 42.9 | 4006 | 3647 | 3628 | 50.6 | 45 | 0.8 | 288 | 75.5 | 43.8 | 35 | 53.1 |
| 487 | 1507 | 18074 | 18094 | 51.1 | 42.9 | 4007 | 18702 | 18685 | 50.2 | 50 | 0.9 | 629 | 76.2 | 42.3 | 35 | 53.5 |
| 488 | 1508 | 3360 | 3380 | 51.4 | 42.9 | 4008 | 3650 | 3631 | 53.1 | 50 | 1.7 | 291 | 75.6 | 44 | 35 | 53.5 |
| 489 | 1509 | 8374 | 8395 | 52.4 | 45.5 | 4009 | 8928 | 8911 | 51.9 | 50 | 0.6 | 555 | 75.1 | 40 | 35 | 53.2 |
| 490 | 1510 | 9929 | 9946 | 50 | 50 | 4010 | 10449 | 10428 | 51.9 | 40.9 | 1.9 | 521 | 75.4 | 40.9 | 35 | 52.9 |
| 491 | 1511 | 26421 | 26441 | 51.5 | 42.9 | 4011 | 27132 | 27111 | 50.3 | 40.9 | 1.2 | 712 | 77.1 | 44.2 | 35 | 54.2 |
| 492 | 1512 | 10250 | 10274 | 51.6 | 40 | 4012 | 10356 | 10336 | 52.4 | 47.6 | 0.8 | 107 | 70.8 | 42.1 | 35 | 50.2 |
| 493 | 1513 | 18074 | 18093 | 50.3 | 45 | 4013 | 18702 | 18685 | 50.2 | 50 | 0.2 | 629 | 76.2 | 42.3 | 35 | 53.5 |
| 494 | 1514 | 18017 | 18036 | 54.8 | 55 | 4014 | 18220 | 18202 | 54.8 | 52.6 | 0 | 204 | 74.3 | 43.1 | 35 | 53.5 |
| 495 | 1515 | 18017 | 18036 | 54.8 | 55 | 4015 | 18225 | 18206 | 53.7 | 50 | 1.1 | 209 | 74.3 | 43.1 | 35 | 53.2 |
| 496 | 1516 | 18017 | 18036 | 54.8 | 55 | 4016 | 18232 | 18210 | 54.4 | 47.8 | 0.4 | 216 | 74.6 | 43.5 | 35 | 53.6 |
| 497 | 1517 | 18017 | 18036 | 54.8 | 55 | 4017 | 18234 | 18214 | 53.4 | 47.6 | 1.4 | 218 | 74.7 | 43.6 | 35 | 53.4 |
| 498 | 1518 | 18017 | 18036 | 54.8 | 55 | 4018 | 18235 | 18215 | 54.2 | 52.4 | 0.6 | 219 | 74.8 | 43.8 | 35 | 53.7 |
| 499 | 1519 | 18017 | 18036 | 54.8 | 55 | 4019 | 18443 | 18424 | 55.9 | 55 | 1.1 | 427 | 76 | 43.1 | 35 | 54.7 |
| 500 | 1520 | 18012 | 18031 | 53.2 | 55 | 4020 | 18220 | 18202 | 54.8 | 52.6 | 1.7 | 209 | 74.5 | 43.5 | 35 | 53.2 |
| 501 | 1521 | 18013 | 18031 | 50.6 | 52.6 | 4021 | 18223 | 18206 | 51.8 | 50 | 1.1 | 211 | 74.4 | 43.1 | 35 | 52.4 |
| 502 | 1522 | 18013 | 18031 | 50.6 | 52.6 | 4022 | 18231 | 18210 | 52.2 | 45.5 | 1.6 | 219 | 74.6 | 43.4 | 35 | 52.5 |
| 503 | 1523 | 18013 | 18031 | 50.6 | 52.6 | 4023 | 18233 | 18214 | 52 | 50 | 1.4 | 221 | 74.8 | 43.9 | 35 | 52.7 |
| 504 | 1524 | 18013 | 18031 | 50.6 | 52.6 | 4024 | 18233 | 18215 | 51.3 | 52.6 | 0.7 | 221 | 74.8 | 43.9 | 35 | 52.7 |
| 505 | 1525 | 18013 | 18031 | 50.6 | 52.6 | 4025 | 18662 | 18641 | 50.4 | 40.9 | 0.2 | 650 | 76.3 | 42.6 | 35 | 53.7 |
| 506 | 1526 | 18009 | 18029 | 53.3 | 52.4 | 4026 | 18220 | 18202 | 54.8 | 52.6 | 1.6 | 212 | 74.5 | 43.4 | 35 | 53.2 |
| 507 | 1527 | 18011 | 18029 | 51.3 | 52.6 | 4027 | 18223 | 18206 | 51.8 | 50 | 0.5 | 213 | 74.4 | 43.2 | 35 | 52.6 |
| 508 | 1528 | 18011 | 18029 | 51.3 | 52.6 | 4028 | 18231 | 18210 | 52.2 | 45.5 | 0.9 | 221 | 74.7 | 43.4 | 35 | 52.8 |
| 509 | 1529 | 18011 | 18029 | 51.3 | 52.6 | 4029 | 18233 | 18214 | 52 | 50 | 0.7 | 223 | 74.9 | 43.9 | 35 | 52.9 |
| 510 | 1530 | 18011 | 18029 | 51.3 | 52.6 | 4030 | 18233 | 18215 | 51.3 | 52.6 | 0 | 223 | 74.9 | 43.9 | 35 | 52.9 |
| 511 | 1531 | 16374 | 16397 | 52.8 | 41.7 | 4031 | 16774 | 16751 | 53.6 | 41.7 | 0.8 | 401 | 75 | 40.9 | 35 | 53.4 |
| 512 | 1532 | 16378 | 16397 | 50.4 | 45 | 4032 | 16780 | 16760 | 51.4 | 42.9 | 1 | 403 | 75 | 40.9 | 35 | 52.7 |
| 513 | 1533 | 2223 | 2243 | 50.2 | 42.9 | 4033 | 2997 | 2976 | 51.4 | 40.9 | 1.2 | 775 | 76.7 | 43.1 | 35 | 53.9 |
| 514 | 1534 | 2428 | 2447 | 51.5 | 50 | 4034 | 3082 | 3058 | 52.3 | 40 | 0.8 | 655 | 76.3 | 42.6 | 35 | 54 |
| 515 | 1535 | 16548 | 16566 | 54.9 | 52.6 | 4035 | 16774 | 16751 | 53.6 | 41.7 | 1.3 | 227 | 73.9 | 41.4 | 35 | 52.9 |
| 516 | 1536 | 16367 | 16386 | 51.4 | 50 | 4036 | 16774 | 16752 | 52.2 | 43.5 | 0.8 | 408 | 75 | 40.9 | 35 | 53 |
| 517 | 1537 | 3230 | 3249 | 50.1 | 45 | 4037 | 3497 | 3478 | 51.3 | 50 | 1.2 | 268 | 74.4 | 41.4 | 35 | 52.2 |
| 518 | 1538 | 8221 | 8240 | 52.4 | 50 | 4038 | 8920 | 8901 | 53.4 | 50 | 1 | 700 | 75.3 | 40 | 35 | 53.6 |
| 519 | 1539 | 3232 | 3252 | 51.1 | 47.6 | 4039 | 3500 | 3481 | 51.2 | 50 | 0.1 | 269 | 74.5 | 41.6 | 35 | 52.5 |
| 520 | 1540 | 3232 | 3252 | 51.1 | 47.6 | 4040 | 3497 | 3478 | 51.3 | 50 | 0.2 | 266 | 74.5 | 41.7 | 35 | 52.6 |
| 521 | 1541 | 16367 | 16386 | 51.4 | 50 | 4041 | 17111 | 17090 | 51.1 | 40.9 | 0.3 | 745 | 76.3 | 42.1 | 35 | 53.8 |
| 522 | 1542 | 16366 | 16385 | 52.9 | 55 | 4042 | 16774 | 16751 | 53.6 | 41.7 | 0.8 | 409 | 75.1 | 41.1 | 35 | 53.5 |
| 523 | 1543 | 9930 | 9948 | 51.5 | 52.6 | 4043 | 10670 | 10649 | 51.3 | 40.9 | 0.2 | 741 | 75.8 | 40.9 | 35 | 53.5 |
| 524 | 1544 | 12370 | 12388 | 50.1 | 47.4 | 4044 | 12996 | 12977 | 50.2 | 40 | 0.2 | 627 | 76.4 | 42.7 | 35 | 53.6 |
| 525 | 1545 | 25354 | 25372 | 50.9 | 52.6 | 4045 | 25650 | 25631 | 51.3 | 45 | 0.4 | 297 | 74.5 | 41.1 | 35 | 52.5 |
| 526 | 1546 | 25354 | 25372 | 50.9 | 52.6 | 4046 | 25651 | 25634 | 50.4 | 50 | 0.5 | 298 | 74.6 | 41.3 | 35 | 52.4 |
| 527 | 1547 | 25354 | 25372 | 50.9 | 52.6 | 4047 | 25772 | 25753 | 51.9 | 50 | 1 | 419 | 74.8 | 40.3 | 35 | 52.8 |
| 528 | 1548 | 1402 | 1422 | 50.2 | 42.9 | 4048 | 1501 | 1482 | 50.5 | 45 | 0.3 | 100 | 72 | 46 | 35 | 50.6 |
| 529 | 1549 | 25354 | 25372 | 50.9 | 52.6 | 4049 | 25831 | 25809 | 51.4 | 43.5 | 0.5 | 478 | 75 | 40.2 | 35 | 52.8 |
| 530 | 1550 | 3797 | 3815 | 50.9 | 47.4 | 4050 | 4434 | 4416 | 51.5 | 52.6 | 0.5 | 638 | 75.4 | 40.3 | 35 | 53.1 |
| 531 | 1551 | 25354 | 25372 | 50.9 | 52.6 | 4051 | 25831 | 25810 | 50.7 | 45.5 | 0.2 | 478 | 75 | 40.2 | 35 | 52.8 |
| 532 | 1552 | 3797 | 3815 | 50.9 | 47.4 | 4052 | 4435 | 4417 | 50.5 | 52.6 | 0.5 | 639 | 75.4 | 40.4 | 35 | 53 |
| 533 | 1553 | 24481 | 24500 | 50.1 | 45 | 4053 | 24938 | 24921 | 50.4 | 50 | 0.3 | 458 | 75.6 | 41.9 | 35 | 53.1 |
| 534 | 1554 | 25348 | 25366 | 51.2 | 47.4 | 4054 | 25831 | 25809 | 51.4 | 43.5 | 0.2 | 484 | 75 | 40.3 | 35 | 53 |
| 535 | 1555 | 25348 | 25366 | 51.2 | 47.4 | 4055 | 25831 | 25810 | 50.7 | 45.5 | 0.4 | 484 | 75 | 40.3 | 35 | 52.8 |
| 536 | 1556 | 24419 | 24440 | 52.3 | 45.5 | 4056 | 25080 | 25062 | 53.5 | 52.6 | 1.2 | 662 | 75.7 | 41.1 | 35 | 53.8 |
| 537 | 1557 | 24420 | 24440 | 50.8 | 42.9 | 4057 | 24527 | 24508 | 50.5 | 45 | 0.3 | 108 | 70.7 | 41.7 | 35 | 49.8 |
| 538 | 1558 | 25348 | 25365 | 50.4 | 50 | 4058 | 25650 | 25631 | 51.3 | 45 | 0.9 | 303 | 74.6 | 41.3 | 35 | 52.4 |
| 539 | 1559 | 25348 | 25365 | 50.4 | 50 | 4059 | 25651 | 25634 | 50.4 | 50 | 0.1 | 304 | 74.7 | 41.4 | 35 | 52.5 |
| 540 | 1560 | 25348 | 25365 | 50.4 | 50 | 4060 | 25831 | 25809 | 51.4 | 43.5 | 1 | 484 | 75 | 40.3 | 35 | 52.7 |
| 541 | 1561 | 25348 | 25365 | 50.4 | 50 | 4061 | 25831 | 25810 | 50.7 | 45.5 | 0.3 | 484 | 75 | 40.3 | 35 | 52.7 |
| 542 | 1562 | 28618 | 28636 | 52.5 | 52.6 | 4062 | 29298 | 29280 | 51.4 | 52.6 | 1.1 | 681 | 78.3 | 47.3 | 35 | 55.3 |
| 543 | 1563 | 8867 | 8887 | 52.3 | 47.6 | 4063 | 9317 | 9297 | 50.5 | 42.9 | 1.8 | 451 | 75.5 | 41.7 | 35 | 53.1 |
| 544 | 1564 | 28820 | 28838 | 53.7 | 52.6 | 4064 | 29301 | 29282 | 55.3 | 55 | 1.6 | 482 | 77.1 | 45.4 | 35 | 55.2 |
| 545 | 1565 | 27365 | 27385 | 53.2 | 47.6 | 4065 | 27464 | 27443 | 54 | 45.5 | 0.8 | 100 | 70.8 | 43 | 35 | 50.6 |
| 546 | 1566 | 28820 | 28839 | 54.3 | 50 | 4066 | 29306 | 29288 | 53.5 | 52.6 | 0.8 | 487 | 77.1 | 45.4 | 35 | 55.1 |
| 547 | 1567 | 28820 | 28839 | 54.3 | 50 | 4067 | 29301 | 29282 | 55.3 | 55 | 1 | 482 | 77.1 | 45.4 | 35 | 55.4 |
| 548 | 1568 | 28821 | 28840 | 51.8 | 45 | 4068 | 29306 | 29288 | 53.5 | 52.6 | 1.7 | 486 | 77.1 | 45.3 | 35 | 54.6 |
| 549 | 1569 | 27370 | 27389 | 50.1 | 45 | 4069 | 27675 | 27656 | 50 | 40 | 0.1 | 306 | 74.2 | 40.2 | 35 | 52 |
| 550 | 1570 | 28820 | 28840 | 54.8 | 47.6 | 4070 | 29301 | 29282 | 55.3 | 55 | 0.4 | 482 | 77.1 | 45.4 | 35 | 55.5 |
| 551 | 1571 | 27370 | 27389 | 50.1 | 45 | 4071 | 27674 | 27654 | 51.9 | 42.9 | 1.8 | 305 | 74.2 | 40.3 | 35 | 52.1 |
| 552 | 1572 | 2429 | 2447 | 50.2 | 47.4 | 4072 | 3188 | 3167 | 50.2 | 40.9 | 0 | 760 | 76.6 | 42.9 | 35 | 53.8 |
| 553 | 1573 | 27375 | 27392 | 50 | 50 | 4073 | 27675 | 27656 | 50 | 40 | 0 | 301 | 74.1 | 40.2 | 35 | 52 |
| 554 | 1574 | 27375 | 27392 | 50 | 50 | 4074 | 27674 | 27654 | 51.9 | 42.9 | 1.9 | 300 | 74.2 | 40.3 | 35 | 52 |
| 555 | 1575 | 19795 | 19814 | 50.4 | 45 | 4075 | 19916 | 19895 | 50.2 | 40.9 | 0.2 | 122 | 71.8 | 42.6 | 35 | 50.5 |
| 556 | 1576 | 3168 | 3189 | 51 | 45.5 | 4076 | 3646 | 3625 | 52 | 40.9 | 1.1 | 479 | 75.7 | 42 | 35 | 53.4 |
| 557 | 1577 | 3168 | 3189 | 51 | 45.5 | 4077 | 3647 | 3628 | 50.6 | 45 | 0.4 | 480 | 75.8 | 42.1 | 35 | 53.3 |
| 558 | 1578 | 18011 | 18029 | 51.3 | 52.6 | 4078 | 18662 | 18641 | 50.4 | 40.9 | 0.9 | 652 | 76.3 | 42.6 | 35 | 53.7 |
| 559 | 1579 | 985 | 1004 | 51.1 | 50 | 4079 | 1493 | 1474 | 50.8 | 45 | 0.3 | 509 | 76.5 | 43.6 | 35 | 53.9 |
| 560 | 1580 | 12965 | 12985 | 51.2 | 42.9 | 4080 | 13547 | 13528 | 50.2 | 45 | 0.9 | 583 | 77.3 | 45.3 | 35 | 54.3 |
| 561 | 1581 | 2427 | 2445 | 52.1 | 52.6 | 4081 | 3188 | 3167 | 50.2 | 40.9 | 1.9 | 762 | 76.7 | 43 | 35 | 53.8 |
| 562 | 1582 | 3360 | 3381 | 52.1 | 40.9 | 4082 | 3650 | 3631 | 53.1 | 50 | 1 | 291 | 75.6 | 44 | 35 | 53.7 |
| 563 | 1583 | 12726 | 12746 | 51.3 | 47.6 | 4083 | 12911 | 12892 | 50.5 | 50 | 0.8 | 186 | 73.5 | 41.9 | 35 | 51.7 |
| 564 | 1584 | 19800 | 19817 | 50.4 | 50 | 4084 | 19917 | 19896 | 50.9 | 45.5 | 0.5 | 118 | 71.9 | 43.2 | 35 | 50.6 |
| 565 | 1585 | 1402 | 1426 | 54.1 | 40 | 4085 | 1501 | 1478 | 54.6 | 41.7 | 0.5 | 100 | 72 | 46 | 35 | 51.8 |
| 566 | 1586 | 2427 | 2445 | 52.1 | 52.6 | 4086 | 3082 | 3058 | 52.3 | 40 | 0.2 | 656 | 76.4 | 42.7 | 35 | 54.2 |
| 567 | 1587 | 8867 | 8887 | 52.3 | 47.6 | 4087 | 9257 | 9238 | 50.5 | 45 | 1.8 | 391 | 75.1 | 41.2 | 35 | 52.8 |
| 568 | 1588 | 8867 | 8887 | 52.3 | 47.6 | 4088 | 9249 | 9231 | 50.8 | 47.4 | 1.5 | 383 | 75.2 | 41.5 | 35 | 53 |
| 569 | 1589 | 8374 | 8394 | 51 | 42.9 | 4089 | 8928 | 8911 | 51.9 | 50 | 0.8 | 555 | 75.1 | 40 | 35 | 53 |
| 570 | 1590 | 8867 | 8887 | 52.3 | 47.6 | 4090 | 9249 | 9230 | 51.5 | 45 | 0.8 | 383 | 75.2 | 41.5 | 35 | 53.2 |
| 571 | 1591 | 28964 | 28984 | 54.3 | 52.4 | 4091 | 29301 | 29282 | 55.3 | 55 | 1 | 338 | 76.5 | 45.3 | 35 | 54.9 |
| 572 | 1592 | 8867 | 8887 | 52.3 | 47.6 | 4092 | 9249 | 9229 | 53 | 47.6 | 0.6 | 383 | 75.2 | 41.5 | 35 | 53.4 |
| 573 | 1593 | 12962 | 12980 | 50.7 | 47.4 | 4093 | 13547 | 13528 | 50.2 | 45 | 0.5 | 586 | 77.4 | 45.4 | 35 | 54.3 |
| 574 | 1594 | 9931 | 9950 | 50.2 | 45 | 4094 | 10605 | 10588 | 51.1 | 50 | 0.9 | 675 | 75.8 | 41.2 | 35 | 53.2 |
| 575 | 1595 | 19801 | 19819 | 53.2 | 52.6 | 4095 | 19918 | 19896 | 52.2 | 43.5 | 1 | 118 | 71.9 | 43.2 | 35 | 51.1 |
| 576 | 1596 | 9055 | 9079 | 52.8 | 40 | 4096 | 9376 | 9355 | 51 | 40.9 | 1.8 | 322 | 75.1 | 42.2 | 35 | 53 |
| 577 | 1597 | 19878 | 19899 | 50.5 | 40.9 | 4097 | 20033 | 20016 | 50.4 | 50 | 0.1 | 156 | 73.4 | 43.6 | 35 | 51.6 |
| 578 | 1598 | 17608 | 17628 | 50.9 | 42.9 | 4098 | 18233 | 18214 | 52 | 50 | 1.1 | 626 | 75.3 | 40.3 | 35 | 53.1 |
| 579 | 1599 | 17608 | 17627 | 50.2 | 45 | 4099 | 18233 | 18214 | 52 | 50 | 1.8 | 626 | 75.3 | 40.3 | 35 | 52.9 |
| 580 | 1600 | 29179 | 29199 | 51.4 | 42.9 | 4100 | 29358 | 29339 | 52.8 | 50 | 1.4 | 180 | 74.8 | 45.6 | 35 | 52.9 |
| 581 | 1601 | 29182 | 29202 | 51.2 | 42.9 | 4101 | 29358 | 29339 | 52.8 | 50 | 1.6 | 177 | 74.6 | 45.2 | 35 | 52.7 |
| 582 | 1602 | 4 | 22 | 52.3 | 52.6 | 4102 | 253 | 233 | 51.8 | 47.6 | 0.5 | 250 | 76.2 | 46.4 | 35 | 54 |
| 583 | 1603 | 8221 | 8240 | 52.4 | 50 | 4103 | 8920 | 8902 | 52.8 | 52.6 | 0.3 | 700 | 75.3 | 40 | 35 | 53.6 |
| 584 | 1604 | 16554 | 16572 | 53.7 | 52.6 | 4104 | 16774 | 16751 | 53.6 | 41.7 | 0.1 | 221 | 73.7 | 41.2 | 35 | 52.8 |
| 585 | 1605 | 16555 | 16572 | 50.3 | 50 | 4105 | 16711 | 16691 | 51 | 42.9 | 0.7 | 157 | 73.4 | 43.3 | 35 | 51.6 |
| 586 | 1606 | 29186 | 29205 | 50.1 | 40 | 4106 | 29412 | 29393 | 50.3 | 45 | 0.3 | 227 | 75.4 | 44.9 | 35 | 52.9 |
| 587 | 1607 | 2429 | 2447 | 50.2 | 47.4 | 4107 | 3052 | 3033 | 50.3 | 50 | 0.1 | 624 | 76.3 | 42.6 | 35 | 53.6 |
| 588 | 1608 | 29182 | 29205 | 54.6 | 41.7 | 4108 | 29358 | 29339 | 52.8 | 50 | 1.7 | 177 | 74.6 | 45.2 | 35 | 53.2 |
| 589 | 1609 | 4 | 22 | 52.3 | 52.6 | 4109 | 255 | 235 | 51.3 | 47.6 | 1 | 252 | 76.3 | 46.4 | 35 | 53.9 |
| 590 | 1610 | 3230 | 3249 | 50.1 | 45 | 4110 | 3500 | 3481 | 51.2 | 50 | 1.1 | 271 | 74.4 | 41.3 | 35 | 52.2 |
| 591 | 1611 | 13040 | 13059 | 50.9 | 50 | 4111 | 13177 | 13156 | 50.4 | 40.9 | 0.5 | 138 | 73.7 | 45.7 | 35 | 51.8 |
| 592 | 1612 | 16551 | 16568 | 51.1 | 50 | 4112 | 17039 | 17022 | 51.4 | 50 | 0.3 | 489 | 75.8 | 42.1 | 35 | 53.5 |
| 593 | 1613 | 19995 | 20012 | 50.4 | 50 | 4113 | 20615 | 20597 | 50.6 | 47.4 | 0.2 | 621 | 75.3 | 40.1 | 35 | 52.9 |
| 594 | 1614 | 19995 | 20013 | 51.8 | 52.6 | 4114 | 20615 | 20597 | 50.6 | 47.4 | 1.2 | 621 | 75.3 | 40.1 | 35 | 53 |
| 595 | 1615 | 12370 | 12388 | 50.1 | 47.4 | 4115 | 12993 | 12975 | 51.4 | 47.4 | 1.3 | 624 | 76.4 | 42.9 | 35 | 53.6 |
| 596 | 1616 | 8374 | 8393 | 51.2 | 45 | 4116 | 8928 | 8911 | 51.9 | 50 | 0.7 | 555 | 75.1 | 40 | 35 | 53 |
| 597 | 1617 | 24174 | 24194 | 50.9 | 42.9 | 4117 | 24936 | 24919 | 51.8 | 50 | 0.8 | 763 | 75.8 | 41 | 35 | 53.5 |
| 598 | 1618 | 24179 | 24198 | 51 | 45 | 4118 | 24936 | 24919 | 51.8 | 50 | 0.7 | 758 | 75.8 | 41 | 35 | 53.5 |
| 599 | 1619 | 7679 | 7698 | 50.6 | 50 | 4119 | 8049 | 8032 | 50.4 | 50 | 0.2 | 371 | 75.4 | 42.3 | 35 | 53 |
| 600 | 1620 | 13177 | 13197 | 50.3 | 42.9 | 4120 | 13320 | 13300 | 51.4 | 47.6 | 1.1 | 144 | 73.2 | 43.8 | 35 | 51.4 |
| 601 | 1621 | 24179 | 24200 | 53.3 | 40.9 | 4121 | 24934 | 24913 | 53.4 | 45.5 | 0.2 | 756 | 75.8 | 41 | 35 | 54.2 |
| 602 | 1622 | 9927 | 9945 | 50.8 | 52.6 | 4122 | 10670 | 10649 | 51.3 | 40.9 | 0.5 | 744 | 75.7 | 40.9 | 35 | 53.4 |
| 603 | 1623 | 2427 | 2445 | 52.1 | 52.6 | 4123 | 3052 | 3033 | 50.3 | 50 | 1.8 | 626 | 76.4 | 42.8 | 35 | 53.6 |
| 604 | 1624 | 24418 | 24436 | 50 | 47.4 | 4124 | 24527 | 24507 | 51 | 42.9 | 1 | 110 | 71.3 | 42.7 | 35 | 50 |
| 605 | 1625 | 24417 | 24436 | 52.6 | 50 | 4125 | 24517 | 24494 | 53.2 | 41.7 | 0.6 | 101 | 71.1 | 43.6 | 35 | 50.6 |
| 606 | 1626 | 8375 | 8396 | 51.8 | 45.5 | 4126 | 8929 | 8911 | 53.4 | 52.6 | 1.6 | 555 | 75.1 | 40 | 35 | 53.2 |
| 607 | 1627 | 24418 | 24439 | 52.9 | 45.5 | 4127 | 25080 | 25062 | 53.5 | 52.6 | 0.6 | 663 | 75.8 | 41.2 | 35 | 54 |
| 608 | 1628 | 18074 | 18094 | 51.1 | 42.9 | 4128 | 18662 | 18641 | 50.4 | 40.9 | 0.6 | 589 | 76.2 | 42.6 | 36 | 53.6 |
| 609 | 1629 | 18074 | 18094 | 51.1 | 42.9 | 4129 | 18632 | 18611 | 50.2 | 40.9 | 0.9 | 559 | 76.2 | 42.8 | 36 | 53.5 |
| 610 | 1630 | 13231 | 13251 | 50.1 | 42.9 | 4130 | 13545 | 13527 | 50.3 | 52.6 | 0.2 | 315 | 77 | 47 | 36 | 54 |
| 611 | 1631 | 7400 | 7417 | 50.2 | 50 | 4131 | 8188 | 8169 | 50.5 | 45 | 0.3 | 789 | 76.4 | 42.2 | 36 | 53.6 |
| 612 | 1632 | 3792 | 3811 | 54 | 55 | 4132 | 4446 | 4424 | 52.4 | 43.5 | 1.6 | 655 | 75.5 | 40.6 | 36 | 53.7 |
| 613 | 1633 | 25782 | 25805 | 52.1 | 41.7 | 4133 | 26182 | 26161 | 51.2 | 40.9 | 0.9 | 401 | 74.7 | 40.1 | 36 | 52.7 |
| 614 | 1634 | 13230 | 13251 | 52.4 | 45.5 | 4134 | 13545 | 13526 | 52.9 | 55 | 0.5 | 316 | 77.1 | 47.2 | 36 | 54.8 |
| 615 | 1635 | 985 | 1004 | 51.1 | 50 | 4135 | 1480 | 1462 | 51.6 | 47.4 | 0.5 | 496 | 76.4 | 43.5 | 36 | 53.9 |
| 616 | 1636 | 7400 | 7417 | 50.2 | 50 | 4136 | 8049 | 8032 | 50.4 | 50 | 0.2 | 650 | 76.1 | 42.2 | 36 | 53.5 |
| 617 | 1637 | 13176 | 13197 | 52.7 | 45.5 | 4137 | 13545 | 13526 | 52.9 | 55 | 0.2 | 370 | 77 | 46.2 | 36 | 54.8 |
| 618 | 1638 | 25782 | 25806 | 53.5 | 40 | 4138 | 26183 | 26162 | 52.8 | 45.5 | 0.7 | 402 | 74.7 | 40.3 | 36 | 53.3 |
| 619 | 1639 | 13176 | 13196 | 51.4 | 47.6 | 4139 | 13547 | 13528 | 50.2 | 45 | 1.2 | 372 | 76.9 | 46 | 36 | 54 |
| 620 | 1640 | 12938 | 12956 | 50.1 | 47.4 | 4140 | 13155 | 13138 | 50.4 | 50 | 0.3 | 218 | 75.4 | 45.4 | 36 | 52.9 |
| 621 | 1641 | 18080 | 18099 | 53 | 50 | 4141 | 18712 | 18693 | 54.8 | 55 | 1.9 | 633 | 76.3 | 42.7 | 36 | 54.4 |
| 622 | 1642 | 9140 | 9159 | 50.1 | 45 | 4142 | 9375 | 9354 | 50.4 | 40.9 | 0.3 | 236 | 74.6 | 42.8 | 36 | 52.3 |
| 623 | 1643 | 7725 | 7742 | 50 | 50 | 4143 | 8054 | 8035 | 50.4 | 50 | 0.4 | 330 | 75 | 41.8 | 36 | 52.6 |
| 624 | 1644 | 9922 | 9941 | 51.3 | 50 | 4144 | 10455 | 10435 | 50.5 | 42.9 | 0.8 | 534 | 75.3 | 40.6 | 36 | 52.9 |
| 625 | 1645 | 12938 | 12957 | 50.9 | 45 | 4145 | 13155 | 13138 | 50.4 | 50 | 0.5 | 218 | 75.4 | 45.4 | 36 | 53 |
| 626 | 1646 | 12366 | 12384 | 51.7 | 52.6 | 4146 | 12996 | 12977 | 50.2 | 40 | 1.4 | 631 | 76.4 | 42.6. | 36 | 53.6 |
| 627 | 1647 | 7617 | 7636 | 50.9 | 50 | 4147 | 8049 | 8032 | 50.4 | 50 | 0.6 | 433 | 75.7 | 42.3 | 36 | 53.2 |
| 628 | 1648 | 2671 | 2692 | 52.1 | 40.9 | 4148 | 3188 | 3167 | 50.2 | 40.9 | 2 | 518 | 75.6 | 41.5 | 36 | 53.1 |
| 629 | 1649 | 26039 | 26057 | 52.6 | 52.6 | 4149 | 26183 | 26164 | 51 | 45 | 1.6 | 145 | 71.9 | 40.7 | 36 | 50.8 |
| 630 | 1650 | 11540 | 11557 | 50.4 | 50 | 4150 | 11727 | 11708 | 50.4 | 45 | 0.1 | 188 | 73.1 | 41 | 36 | 51.4 |
| 631 | 1651 | 12962 | 12980 | 50.7 | 47.4 | 4151 | 13545 | 13527 | 50.3 | 52.6 | 0.4 | 584 | 77.4 | 45.5 | 36 | 54.4 |
| 632 | 1652 | 12961 | 12980 | 53.2 | 50 | 4152 | 13545 | 13526 | 52.9 | 55 | 0.4 | 585 | 77.5 | 45.6 | 36 | 55.2 |
| 633 | 1653 | 9055 | 9079 | 52.8 | 40 | 4153 | 9369 | 9350 | 51.5 | 50 | 1.4 | 315 | 75.3 | 42.9 | 36 | 53.3 |
| 634 | 1654 | 12965 | 12985 | 51.2 | 42.9 | 4154 | 13545 | 13527 | 50.3 | 52.6 | 0.9 | 581 | 77.4 | 45.4 | 36 | 54.3 |
| 635 | 1655 | 26039 | 26058 | 54 | 55 | 4155 | 26693 | 26674 | 54.8 | 55 | 0.8 | 655 | 75.7 | 41.1 | 36 | 54.3 |
| 636 | 1656 | 26039 | 26058 | 54 | 55 | 4156 | 26692 | 26673 | 52.6 | 50 | 1.4 | 654 | 75.7 | 41 | 36 | 53.8 |
| 637 | 1657 | 26039 | 26058 | 54 | 55 | 4157 | 26688 | 26669 | 52.1 | 45 | 2 | 650 | 75.6 | 40.8 | 36 | 53.6 |
| 638 | 1658 | 26039 | 26058 | 54 | 55 | 4158 | 26684 | 26666 | 53.4 | 52.6 | 0.6 | 646 | 75.6 | 40.9 | 36 | 54.1 |
| 639 | 1659 | 26039 | 26058 | 54 | 55 | 4159 | 26683 | 26665 | 52.7 | 52.6 | 1.4 | 645 | 75.6 | 40.9 | 36 | 53.8 |
| 640 | 1660 | 12965 | 12985 | 51.2 | 42.9 | 4160 | 13545 | 13526 | 52.9 | 55 | 1.7 | 581 | 77.4 | 45.4 | 36 | 54.6 |
| 641 | 1661 | 26039 | 26058 | 54 | 55 | 4161 | 26183 | 26162 | 52.8 | 45.5 | 1.2 | 145 | 71.9 | 40.7 | 36 | 51.3 |
| 642 | 1662 | 9055 | 9079 | 52.8 | 40 | 4162 | 9365 | 9347 | 53 | 52.6 | 0.2 | 311 | 75.3 | 42.8 | 36 | 53.6 |
| 643 | 1663 | 19795 | 19814 | 50.4 | 45 | 4163 | 19922 | 19902 | 50 | 42.9 | 0.4 | 128 | 72.2 | 43 | 36 | 50.7 |
| 644 | 1664 | 12965 | 12988 | 54 | 41.7 | 4164 | 13545 | 13526 | 52.9 | 55 | 1.2 | 581 | 77.4 | 45.4 | 36 | 55.1 |
| 645 | 1665 | 26040 | 26061 | 56.4 | 54.5 | 4165 | 26693 | 26674 | 54.8 | 55 | 1.6 | 654 | 75.7 | 41.1 | 36 | 54.6 |
| 646 | 1666 | 26040 | 26061 | 56.4 | 54.5 | 4166 | 26693 | 26673 | 55.3 | 52.4 | 1.1 | 654 | 75.7 | 41.1 | 36 | 54.7 |
| 647 | 1667 | 26040 | 26061 | 56.4 | 54.5 | 4167 | 26690 | 26669 | 56.3 | 50 | 0.1 | 651 | 75.7 | 41 | 36 | 55 |
| 648 | 1668 | 26040 | 26061 | 56.4 | 54.5 | 4168 | 26685 | 26666 | 54.8 | 55 | 1.6 | 646 | 75.7 | 41 | 36 | 54.5 |
| 649 | 1669 | 26040 | 26061 | 56.4 | 54.5 | 4169 | 26685 | 26665 | 55.3 | 52.4 | 1.1 | 646 | 75.7 | 41 | 36 | 54.7 |
| 650 | 1670 | 18011 | 18031 | 54.5 | 52.4 | 4170 | 18443 | 18424 | 55.9 | 55 | 1.4 | 433 | 76.1 | 43.2 | 36 | 54.7 |
| 651 | 1671 | 7876 | 7895 | 51.5 | 45 | 4171 | 8049 | 8032 | 50.4 | 50 | 1.2 | 174 | 73.2 | 42 | 36 | 51.5 |
| 652 | 1672 | 3230 | 3249 | 50.1 | 45 | 4172 | 3646 | 3625 | 52 | 40.9 | 1.9 | 417 | 75.2 | 41.2 | 36 | 52.8 |
| 653 | 1673 | 19795 | 19814 | 50.4 | 45 | 4173 | 19920 | 19899 | 50.2 | 40.9 | 0.3 | 126 | 72.1 | 42.9 | 36 | 50.6 |
| 654 | 1674 | 12366 | 12384 | 51.7 | 52.6 | 4174 | 12993 | 12975 | 51.4 | 47.4 | 0.3 | 628 | 76.5 | 43 | 36 | 54 |
| 655 | 1675 | 19793 | 19814 | 54 | 50 | 4175 | 20544 | 20524 | 52.3 | 47.6 | 1.7 | 752 | 75.4 | 40 | 36 | 53.6 |
| 656 | 1676 | 12366 | 12384 | 51.7 | 52.6 | 4176 | 12911 | 12892 | 50.5 | 50 | 1.2 | 546 | 76.1 | 42.5 | 36 | 53.5 |
| 657 | 1677 | 7728 | 7746 | 51.7 | 52.6 | 4177 | 8188 | 8168 | 50.4 | 42.9 | 1.3 | 461 | 75.6 | 41.9 | 36 | 53.1 |
| 658 | 1678 | 26421 | 26441 | 51.5 | 42.9 | 4178 | 27084 | 27063 | 51.6 | 40.9 | 0.2 | 664 | 77.3 | 45 | 36 | 54.7 |
| 659 | 1679 | 9929 | 9946 | 50 | 50 | 4179 | 10455 | 10434 | 51.1 | 40.9 | 1.1 | 527 | 75.3 | 40.6 | 36 | 52.8 |
| 660 | 1680 | 26421 | 26441 | 51.5 | 42.9 | 4180 | 27083 | 27062 | 50.7 | 40.9 | 0.8 | 663 | 77.4 | 45.1 | 36 | 54.5 |
| 661 | 1681 | 12236 | 12256 | 51.2 | 42.9 | 4181 | 12999 | 12980 | 50.6 | 40 | 0.6 | 764 | 76.4 | 42.4 | 36 | 53.8 |
| 662 | 1682 | 26421 | 26441 | 51.5 | 42.9 | 4182 | 26694 | 26677 | 51.4 | 50 | 0 | 274 | 74.9 | 42.7 | 36 | 53 |
| 663 | 1683 | 9929 | 9946 | 50 | 50 | 4183 | 10183 | 10166 | 50.9 | 50 | 0.8 | 255 | 75.3 | 43.9 | 36 | 52.8 |
| 664 | 1684 | 12234 | 12252 | 50.6 | 47.4 | 4184 | 13000 | 12981 | 51.1 | 45 | 0.5 | 767 | 76.4 | 42.5 | 36 | 53.8 |
| 665 | 1685 | 8868 | 8889 | 50.4 | 40.9 | 4185 | 9254 | 9236 | 50.6 | 47.4 | 0.2 | 387 | 75 | 41.1 | 36 | 52.7 |
| 666 | 1686 | 9130 | 9150 | 51.3 | 42.9 | 4186 | 9597 | 9577 | 50.3 | 42.9 | 1 | 468 | 75.4 | 41.2 | 36 | 52.9 |
| 667 | 1687 | 9935 | 9955 | 50.4 | 42.9 | 4187 | 10605 | 10588 | 51.1 | 50 | 0.7 | 671 | 75.8 | 41.1 | 36 | 53.2 |
| 668 | 1688 | 26421 | 26441 | 51.5 | 42.9 | 4188 | 26587 | 26569 | 52 | 47.4 | 0.5 | 167 | 72.3 | 40.1 | 36 | 51.2 |
| 669 | 1689 | 9130 | 9150 | 51.3 | 42.9 | 4189 | 9597 | 9576 | 51 | 40.9 | 0.3 | 468 | 75.4 | 41.2 | 36 | 53.2 |
| 670 | 1690 | 26708 | 26727 | 50 | 45 | 4190 | 27466 | 27449 | 51 | 50 | 0.9 | 759 | 76 | 41.4 | 36 | 53.3 |
| 671 | 1691 | 9130 | 9150 | 51.3 | 42.9 | 4191 | 9375 | 9354 | 50.4 | 40.9 | 0.9 | 246 | 74.7 | 42.7 | 36 | 52.5 |
| 672 | 1692 | 10246 | 10266 | 50.4 | 47.6 | 4192 | 10608 | 10589 | 51 | 50 | 0.5 | 363 | 74.5 | 40.2 | 36 | 52.4 |
| 673 | 1693 | 9924 | 9944 | 53.1 | 52.4 | 4193 | 10449 | 10425 | 54.6 | 40 | 1.5 | 526 | 75.4 | 40.9 | 36 | 53.8 |
| 674 | 1694 | 12366 | 12384 | 51.7 | 52.6 | 4194 | 12911 | 12891 | 51.2 | 47.6 | 0.5 | 546 | 76.1 | 42.5 | 36 | 53.7 |
| 675 | 1695 | 26708 | 26731 | 54.2 | 41.7 | 4195 | 27466 | 27448 | 52.3 | 52.6 | 1.9 | 759 | 76 | 41.4 | 36 | 54 |
| 676 | 1696 | 8867 | 8888 | 52.7 | 45.5 | 4196 | 9107 | 9086 | 51.6 | 45.5 | 1.1 | 241 | 74.1 | 41.5 | 36 | 52.5 |
| 677 | 1697 | 9131 | 9151 | 50.4 | 42.9 | 4197 | 9597 | 9577 | 50.3 | 42.9 | 0.1 | 467 | 75.4 | 41.3 | 36 | 53 |
| 678 | 1698 | 9131 | 9151 | 50.4 | 42.9 | 4198 | 9597 | 9576 | 51 | 40.9 | 0.6 | 467 | 75.4 | 41.3 | 36 | 53 |
| 679 | 1699 | 10242 | 10265 | 51.2 | 41.7 | 4199 | 10608 | 10589 | 51 | 50 | 0.3 | 367 | 74.5 | 40.1 | 36 | 52.5 |
| 680 | 1700 | 27361 | 27380 | 52.4 | 55 | 4200 | 27468 | 27451 | 51.1 | 50 | 1.3 | 108 | 72.3 | 45.4 | 36 | 51 |
| 681 | 1701 | 27361 | 27380 | 52.4 | 55 | 4201 | 27467 | 27450 | 52.1 | 50 | 0.3 | 107 | 72.4 | 45.8 | 36 | 51.4 |
| 682 | 1702 | 27361 | 27380 | 52.4 | 55 | 4202 | 27466 | 27449 | 51 | 50 | 1.4 | 106 | 72.5 | 46.2 | 36 | 51.1 |
| 683 | 1703 | 9926 | 9944 | 50.5 | 52.6 | 4203 | 10449 | 10428 | 51.9 | 40.9 | 1.4 | 524 | 75.4 | 40.8 | 36 | 53 |
| 684 | 1704 | 9926 | 9944 | 50.5 | 52.6 | 4204 | 10449 | 10431 | 50.9 | 47.4 | 0.5 | 524 | 75.4 | 40.8 | 36 | 53 |
| 685 | 1705 | 19802 | 19820 | 53 | 52.6 | 4205 | 19922 | 19901 | 51.5 | 45.5 | 1.4 | 121 | 72.3 | 43.8 | 36 | 51.2 |
| 686 | 1706 | 27361 | 27380 | 52.4 | 55 | 4206 | 27462 | 27443 | 51.4 | 45 | 1 | 102 | 71.8 | 45.1 | 36 | 50.8 |
| 687 | 1707 | 10140 | 10159 | 52.4 | 50 | 4207 | 10605 | 10588 | 51.1 | 50 | 1.3 | 466 | 75 | 40.3 | 36 | 52.9 |
| 688 | 1708 | 16366 | 16384 | 50.3 | 52.6 | 4208 | 16777 | 16758 | 51.5 | 50 | 1.2 | 412 | 75.1 | 41 | 36 | 52.8 |
| 689 | 1709 | 16366 | 16385 | 52.9 | 55 | 4209 | 16781 | 16761 | 51.3 | 47.6 | 1.6 | 416 | 75.1 | 41.1 | 36 | 53.1 |
| 690 | 1710 | 985 | 1008 | 56.1 | 50 | 4210 | 1484 | 1464 | 54.3 | 47.6 | 1.8 | 500 | 76.4 | 43.6 | 36 | 54.9 |
| 691 | 1711 | 16366 | 16385 | 52.9 | 55 | 4211 | 16777 | 16758 | 51.5 | 50 | 1.4 | 412 | 75.1 | 41 | 36 | 53.1 |
| 692 | 1712 | 27366 | 27384 | 52.2 | 52.6 | 4212 | 27466 | 27448 | 52.3 | 52.6 | 0.1 | 101 | 71.5 | 44.6 | 36 | 50.8 |
| 693 | 1713 | 985 | 1008 | 56.1 | 50 | 4213 | 1483 | 1462 | 54.3 | 45.5 | 1.8 | 499 | 76.4 | 43.5 | 36 | 54.8 |
| 694 | 1714 | 2823 | 2844 | 50.4 | 45.5 | 4214 | 3052 | 3033 | 50.3 | 50 | 0.2 | 230 | 74.1 | 41.7 | 36 | 52 |
| 695 | 1715 | 3224 | 3242 | 50.5 | 52.6 | 4215 | 3504 | 3485 | 50.4 | 45 | 0.1 | 281 | 74.7 | 42 | 36 | 52.5 |
| 696 | 1716 | 8867 | 8886 | 50.7 | 50 | 4216 | 9310 | 9291 | 51.2 | 45 | 0.5 | 444 | 75.4 | 41.4 | 36 | 53.1 |
| 697 | 1717 | 8867 | 8886 | 50.7 | 50 | 4217 | 9254 | 9236 | 50.6 | 47.4 | 0.1 | 388 | 75.1 | 41.2 | 36 | 52.8 |
| 698 | 1718 | 9349 | 9367 | 51.7 | 52.6 | 4218 | 9989 | 9968 | 51 | 40.9 | 0.7 | 641 | 75.4 | 40.4 | 36 | 53.2 |
| 699 | 1719 | 8867 | 8887 | 52.3 | 47.6 | 4219 | 9369 | 9350 | 51.5 | 50 | 0.8 | 503 | 75.8 | 42.1 | 36 | 53.6 |
| 700 | 1720 | 8867 | 8887 | 52.3 | 47.6 | 4220 | 9341 | 9322 | 51.1 | 50 | 1.2 | 475 | 75.7 | 41.9 | 36 | 53.4 |
| 701 | 1721 | 9926 | 9944 | 50.5 | 52.6 | 4221 | 10608 | 10589 | 51 | 50 | 0.5 | 683 | 75.8 | 41.1 | 36 | 53.3 |
| 702 | 1722 | 7725 | 7742 | 50 | 50 | 4222 | 8190 | 8172 | 50.3 | 47.4 | 0.3 | 466 | 75.6 | 41.8 | 36 | 53 |
| 703 | 1723 | 9131 | 9151 | 50.4 | 42.9 | 4223 | 9375 | 9354 | 50.4 | 40.9 | 0 | 245 | 74.7 | 42.9 | 36 | 52.5 |
| 704 | 1724 | 3055 | 3075 | 51.8 | 47.6 | 4224 | 3494 | 3473 | 50.4 | 40.9 | 1.4 | 440 | 76 | 43 | 36 | 53.4 |
| 705 | 1725 | 7725 | 7742 | 50 | 50 | 4225 | 8189 | 8170 | 50.6 | 50 | 0.6 | 465 | 75.6 | 41.9 | 36 | 53.1 |
| 706 | 1726 | 2823 | 2844 | 50.4 | 45.5 | 4226 | 3056 | 3038 | 50.8 | 52.6 | 0.3 | 234 | 74.2 | 41.9 | 36 | 52.2 |
| 707 | 1727 | 12370 | 12388 | 50.1 | 47.4 | 4227 | 13155 | 13138 | 50.4 | 50 | 0.3 | 786 | 76.8 | 43.4 | 36 | 53.9 |
| 708 | 1728 | 3055 | 3075 | 51.8 | 47.6 | 4228 | 3209 | 3189 | 50.5 | 47.6 | 1.3 | 155 | 74.1 | 45.2 | 36 | 52.1 |
| 709 | 1729 | 8867 | 8887 | 52.3 | 47.6 | 4229 | 9340 | 9319 | 50.8 | 45.5 | 1.6 | 474 | 75.6 | 41.8 | 36 | 53.3 |
| 710 | 1730 | 27367 | 27385 | 51.4 | 52.6 | 4230 | 27466 | 27448 | 52.3 | 52.6 | 0.9 | 100 | 71.6 | 45 | 36 | 50.6 |
| 711 | 1731 | 14951 | 14975 | 52.2 | 40 | 4231 | 15146 | 15129 | 50.3 | 50 | 1.9 | 196 | 73.2 | 40.8 | 36 | 51.4 |
| 712 | 1732 | 8867 | 8887 | 52.3 | 47.6 | 4232 | 9311 | 9292 | 50.7 | 50 | 1.6 | 445 | 75.4 | 41.6 | 36 | 53.1 |
| 713 | 1733 | 12234 | 12252 | 50.6 | 47.4 | 4233 | 12999 | 12980 | 50.6 | 40 | 0 | 766 | 76.4 | 42.4 | 36 | 53.8 |
| 714 | 1734 | 3055 | 3076 | 52.4 | 45.5 | 4234 | 3495 | 3473 | 51.8 | 43.5 | 0.6 | 441 | 76 | 43.1 | 36 | 53.9 |
| 715 | 1735 | 8867 | 8887 | 52.3 | 47.6 | 4235 | 9109 | 9087 | 50.5 | 43.5 | 1.8 | 243 | 74 | 41.2 | 36 | 52.1 |
| 716 | 1736 | 3055 | 3076 | 52.4 | 45.5 | 4236 | 3209 | 3189 | 50.5 | 47.6 | 2 | 155 | 74.1 | 45.2 | 36 | 52.1 |
| 717 | 1737 | 2671 | 2692 | 52.1 | 40.9 | 4237 | 3053 | 3034 | 50.3 | 50 | 1.8 | 383 | 74.7 | 40.5 | 36 | 52.5 |
| 718 | 1738 | 16981 | 17000 | 51.3 | 50 | 4238 | 17501 | 17481 | 51.2 | 42.9 | 0.1 | 521 | 75.9 | 42.2 | 36 | 53.6 |
| 719 | 1739 | 3796 | 3814 | 50.8 | 52.6 | 4239 | 4444 | 4424 | 50.6 | 42.9 | 0.2 | 649 | 75.5 | 40.5 | 36 | 53.1 |
| 720 | 1740 | 3796 | 3814 | 50.8 | 52.6 | 4240 | 4445 | 4425 | 50.6 | 42.9 | 0.2 | 650 | 75.5 | 40.5 | 36 | 53.1 |
| 721 | 1741 | 27382 | 27401 | 50.8 | 45 | 4241 | 27546 | 27527 | 51.3 | 50 | 0.6 | 165 | 73.7 | 43.6 | 36 | 51.9 |
| 722 | 1742 | 27382 | 27401 | 50.8 | 45 | 4242 | 27541 | 27522 | 50.1 | 45 | 0.6 | 160 | 73.4 | 43.1 | 36 | 51.5 |
| 723 | 1743 | 27383 | 27403 | 50.3 | 42.9 | 4243 | 27546 | 27527 | 51.3 | 50 | 1.1 | 164 | 73.5 | 43.3 | 36 | 51.7 |
| 724 | 1744 | 27383 | 27403 | 50.3 | 42.9 | 4244 | 27541 | 27522 | 50.1 | 45 | 0.1 | 159 | 73.2 | 42.8 | 36 | 51.4 |
| 725 | 1745 | 17789 | 17811 | 52.9 | 43.5 | 4245 | 18220 | 18202 | 54.8 | 52.6 | 1.9 | 432 | 74.9 | 40.5 | 36 | 53.4 |
| 726 | 1746 | 17791 | 17813 | 52.9 | 43.5 | 4246 | 18220 | 18202 | 54.8 | 52.6 | 1.9 | 430 | 74.9 | 40.5 | 36 | 53.4 |
| 727 | 1747 | 18004 | 18023 | 51.1 | 50 | 4247 | 18233 | 18215 | 51.3 | 52.6 | 0.2 | 230 | 75 | 43.9 | 36 | 52.9 |
| 728 | 1748 | 18004 | 18023 | 51.1 | 50 | 4248 | 18231 | 18210 | 52.2 | 45.5 | 1.1 | 228 | 74.7 | 43.4 | 36 | 52.8 |
| 729 | 1749 | 27437 | 27456 | 50.2 | 40 | 4249 | 27546 | 27527 | 51.3 | 50 | 1.1 | 110 | 72.4 | 45.5 | 36 | 50.8 |
| 730 | 1750 | 27437 | 27456 | 50.2 | 40 | 4250 | 27541 | 27522 | 50.1 | 45 | 0.1 | 105 | 71.8 | 44.8 | 36 | 50.4 |
| 731 | 1751 | 18004 | 18023 | 51.1 | 50 | 4251 | 18223 | 18206 | 51.8 | 50 | 0.6 | 220 | 74.5 | 43.2 | 36 | 52.6 |
| 732 | 1752 | 12233 | 12251 | 51.1 | 52.6 | 4252 | 12994 | 12976 | 50.3 | 47.4 | 0.8 | 762 | 76.5 | 42.5 | 36 | 53.7 |
| 733 | 1753 | 7869 | 7889 | 52.5 | 47.6 | 4253 | 8192 | 8172 | 50.9 | 42.9 | 1.6 | 324 | 75.2 | 42.3 | 36 | 53 |
| 734 | 1754 | 3224 | 3242 | 50.5 | 52.6 | 4254 | 3503 | 3484 | 51.5 | 50 | 0.9 | 280 | 74.8 | 42.1 | 36 | 52.6 |
| 735 | 1755 | 3224 | 3242 | 50.5 | 52.6 | 4255 | 3500 | 3481 | 51.2 | 50 | 0.6 | 277 | 74.6 | 41.9 | 36 | 52.5 |
| 736 | 1756 | 3224 | 3242 | 50.5 | 52.6 | 4256 | 3497 | 3478 | 51.3 | 50 | 0.8 | 274 | 74.6 | 42 | 36 | 52.5 |
| 737 | 1757 | 1 | 22 | 54.8 | 50 | 4257 | 204 | 185 | 56.6 | 55 | 1.8 | 204 | 75.1 | 45.1 | 36 | 54.1 |
| 738 | 1758 | 9140 | 9159 | 50.1 | 45 | 4258 | 9597 | 9576 | 51 | 40.9 | 0.9 | 458 | 75.3 | 41.3 | 36 | 52.9 |
| 739 | 1759 | 28179 | 28200 | 50.8 | 40.9 | 4259 | 28671 | 28653 | 50.2 | 52.6 | 0.6 | 493 | 79.7 | 51.7 | 36 | 56 |
| 740 | 1760 | 9140 | 9159 | 50.1 | 45 | 4260 | 9560 | 9540 | 51.6 | 42.9 | 1.5 | 421 | 75.2 | 41.3 | 36 | 52.8 |
| 741 | 1761 | 7728 | 7746 | 51.7 | 52.6 | 4261 | 8189 | 8170 | 50.6 | 50 | 1.1 | 462 | 75.7 | 42 | 36 | 53.3 |
| 742 | 1762 | 9140 | 9159 | 50.1 | 45 | 4262 | 9559 | 9539 | 50.6 | 42.9 | 0.5 | 420 | 75.3 | 41.4 | 36 | 52.8 |
| 743 | 1763 | 12235 | 12253 | 50.1 | 52.6 | 4263 | 12998 | 12979 | 50.1 | 45 | 0 | 764 | 76.5 | 42.5 | 36 | 53.7 |
| 744 | 1764 | 3225 | 3244 | 52.4 | 55 | 4264 | 3503 | 3484 | 51.5 | 50 | 1 | 279 | 74.8 | 42.3 | 36 | 52.9 |
| 745 | 1765 | 14951 | 14975 | 52.2 | 40 | 4265 | 15595 | 15576 | 50.8 | 45 | 1.3 | 645 | 75.5 | 40.6 | 36 | 53.2 |
| 746 | 1766 | 3225 | 3244 | 52.4 | 55 | 4266 | 3500 | 3481 | 51.2 | 50 | 1.3 | 276 | 74.7 | 42 | 36 | 52.7 |
| 747 | 1767 | 12233 | 12251 | 51.1 | 52.6 | 4267 | 12999 | 12980 | 50.6 | 40 | 0.6 | 767 | 76.4 | 42.5 | 36 | 53.8 |
| 748 | 1768 | 3225 | 3244 | 52.4 | 55 | 4268 | 3497 | 3478 | 51.3 | 50 | 1.1 | 273 | 74.7 | 42.1 | 36 | 52.8 |
| 749 | 1769 | 12233 | 12251 | 51.1 | 52.6 | 4269 | 13000 | 12981 | 51.1 | 45 | 0.1 | 768 | 76.5 | 42.6 | 36 | 54 |
| 750 | 1770 | 28395 | 28414 | 51.5 | 45 | 4270 | 28671 | 28653 | 50.2 | 52.6 | 1.3 | 277 | 78.5 | 51.3 | 36 | 55.1 |
| 751 | 1771 | 28395 | 28414 | 51.5 | 45 | 4271 | 28671 | 28652 | 52.8 | 55 | 1.3 | 277 | 78.5 | 51.3 | 36 | 55.5 |
| 752 | 1772 | 9931 | 9950 | 50.2 | 45 | 4272 | 10449 | 10431 | 50.9 | 47.4 | 0.8 | 519 | 75.3 | 40.8 | 36 | 52.9 |
| 753 | 1773 | 12235 | 12253 | 50.1 | 52.6 | 4273 | 12994 | 12976 | 50.3 | 47.4 | 0.2 | 760 | 76.4 | 42.5 | 36 | 53.6 |
| 754 | 1774 | 3359 | 3379 | 51.2 | 42.9 | 4274 | 3650 | 3631 | 53.1 | 50 | 1.9 | 292 | 75.6 | 43.8 | 36 | 53.4 |
| 755 | 1775 | 11543 | 11562 | 50.4 | 40 | 4275 | 12258 | 12238 | 50.3 | 42.9 | 0.2 | 716 | 76.1 | 41.9 | 36 | 53.5 |
| 756 | 1776 | 28396 | 28416 | 52.4 | 47.6 | 4276 | 28672 | 28653 | 51.8 | 55 | 0.5 | 277 | 78.6 | 51.6 | 36 | 55.7 |
| 757 | 1777 | 28396 | 28416 | 52.4 | 47.6 | 4277 | 28671 | 28652 | 52.8 | 55 | 0.4 | 276 | 78.6 | 51.4 | 36 | 55.8 |
| 758 | 1778 | 3229 | 3248 | 50.6 | 50 | 4278 | 3647 | 3628 | 50.6 | 45 | 0 | 419 | 75.3 | 41.5 | 36 | 53 |
| 759 | 1779 | 12235 | 12253 | 50.1 | 52.6 | 4279 | 12992 | 12974 | 51.2 | 52.6 | 1.1 | 758 | 76.5 | 42.6 | 36 | 53.7 |
| 760 | 1780 | 3229 | 3248 | 50.6 | 50 | 4280 | 3646 | 3625 | 52 | 40.9 | 1.4 | 418 | 75.3 | 41.4 | 36 | 53 |
| 761 | 1781 | 3228 | 3248 | 52 | 47.6 | 4281 | 3650 | 3631 | 53.1 | 50 | 1.1 | 423 | 75.4 | 41.6 | 36 | 53.5 |
| 762 | 1782 | 3230 | 3249 | 50.1 | 45 | 4282 | 3647 | 3628 | 50.6 | 45 | 0.5 | 418 | 75.3 | 41.4 | 36 | 52.8 |
| 763 | 1783 | 9931 | 9950 | 50.2 | 45 | 4283 | 10449 | 10428 | 51.9 | 40.9 | 1.8 | 519 | 75.3 | 40.8 | 36 | 52.9 |
| 764 | 1784 | 1402 | 1422 | 50.2 | 42.9 | 4284 | 1622 | 1602 | 51.6 | 47.6 | 1.4 | 221 | 76.5 | 48 | 36 | 53.7 |
| 765 | 1785 | 9922 | 9941 | 51.3 | 50 | 4285 | 10608 | 10589 | 51 | 50 | 0.3 | 687 | 75.8 | 41.2 | 36 | 53.5 |
| 766 | 1786 | 3792 | 3810 | 52.9 | 52.6 | 4286 | 4318 | 4294 | 54.4 | 40 | 1.5 | 527 | 75.5 | 41.2 | 36 | 53.8 |
| 767 | 1787 | 2429 | 2447 | 50.2 | 47.4 | 4287 | 3189 | 3168 | 51 | 45.5 | 0.7 | 761 | 76.6 | 43 | 36 | 53.8 |
| 768 | 1788 | 18008 | 18029 | 54.5 | 50 | 4288 | 18443 | 18424 | 55.9 | 55 | 1.4 | 436 | 76 | 43.1 | 36 | 54.7 |
| 769 | 1789 | 13039 | 13058 | 51.8 | 50 | 4289 | 13179 | 13158 | 50.4 | 40.9 | 1.5 | 141 | 74 | 46.1 | 36 | 52 |
| 770 | 1790 | 942 | 961 | 52.8 | 50 | 4290 | 1484 | 1466 | 53.1 | 52.6 | 0.4 | 543 | 76.9 | 44.4 | 36 | 54.7 |
| 771 | 1791 | 943 | 961 | 50.3 | 47.4 | 4291 | 1483 | 1464 | 51.3 | 45 | 1 | 541 | 76.8 | 44.2 | 36 | 53.9 |
| 772 | 1792 | 28867 | 28886 | 53.2 | 50 | 4292 | 29358 | 29339 | 52.8 | 50 | 0.3 | 492 | 76.9 | 44.9 | 36 | 54.8 |
| 773 | 1793 | 943 | 961 | 50.3 | 47.4 | 4293 | 1483 | 1465 | 50.5 | 47.4 | 0.3 | 541 | 76.8 | 44.2 | 36 | 53.9 |
| 774 | 1794 | 28866 | 28886 | 55.4 | 52.4 | 4294 | 29301 | 29282 | 55.3 | 55 | 0.2 | 436 | 77 | 45.4 | 36 | 55.6 |
| 775 | 1795 | 12352 | 12375 | 52.9 | 41.7 | 4295 | 12997 | 12977 | 51.8 | 42.9 | 1.1 | 646 | 76.4 | 42.9 | 36 | 54.1 |
| 776 | 1796 | 28867 | 28887 | 53.7 | 47.6 | 4296 | 29358 | 29339 | 52.8 | 50 | 0.9 | 492 | 76.9 | 44.9 | 36 | 54.8 |
| 777 | 1797 | 3896 | 3917 | 50.7 | 40.9 | 4297 | 4608 | 4590 | 51.5 | 52.6 | 0.9 | 713 | 75.5 | 40.4 | 36 | 53.2 |
| 778 | 1798 | 6098 | 6118 | 50.3 | 42.9 | 4298 | 6486 | 6467 | 50.8 | 45 | 0.5 | 389 | 74.6 | 40.1 | 36 | 52.4 |
| 779 | 1799 | 28868 | 28888 | 51.4 | 42.9 | 4299 | 29358 | 29339 | 52.8 | 50 | 1.4 | 491 | 76.9 | 44.8 | 36 | 54.3 |
| 780 | 1800 | 8220 | 8240 | 54 | 47.6 | 4300 | 8931 | 8913 | 55.5 | 52.6 | 1.4 | 712 | 75.4 | 40 | 36 | 54.1 |
| 781 | 1801 | 2220 | 2239 | 51.3 | 45 | 4301 | 2672 | 2653 | 51.6 | 50 | 0.4 | 453 | 77 | 45.3 | 36 | 54.4 |
| 782 | 1802 | 12040 | 12057 | 50.6 | 50 | 4302 | 12493 | 12476 | 50.7 | 50 | 0.1 | 454 | 76.3 | 43.6 | 36 | 53.7 |
| 783 | 1803 | 942 | 960 | 52.1 | 52.6 | 4303 | 1483 | 1464 | 51.3 | 45 | 0.8 | 542 | 76.8 | 44.3 | 36 | 54.3 |
| 784 | 1804 | 28868 | 28889 | 52 | 40.9 | 4304 | 29358 | 29339 | 52.8 | 50 | 0.8 | 491 | 76.9 | 44.8 | 36 | 54.5 |
| 785 | 1805 | 942 | 960 | 52.1 | 52.6 | 4305 | 1483 | 1465 | 50.5 | 47.4 | 1.6 | 542 | 76.8 | 44.3 | 36 | 54 |
| 786 | 1806 | 12040 | 12057 | 50.6 | 50 | 4306 | 12724 | 12705 | 52.4 | 55 | 1.8 | 685 | 76.6 | 43.1 | 36 | 53.9 |
| 787 | 1807 | 942 | 960 | 52.1 | 52.6 | 4307 | 1484 | 1466 | 53.1 | 52.6 | 1 | 543 | 76.9 | 44.4 | 36 | 54.5 |
| 788 | 1808 | 11545 | 11563 | 50.8 | 47.4 | 4308 | 12253 | 12235 | 50.1 | 52.6 | 0.7 | 709 | 76.2 | 42.2 | 36 | 53.5 |
| 789 | 1809 | 98 | 118 | 50.6 | 42.9 | 4309 | 269 | 251 | 51.1 | 52.6 | 0.5 | 172 | 75 | 46.5 | 36 | 52.8 |
| 790 | 1810 | 12373 | 12391 | 50.8 | 47.4 | 4310 | 12911 | 12892 | 50.5 | 50 | 0.3 | 539 | 76.1 | 42.5 | 36 | 53.5 |
| 791 | 1811 | 16366 | 16384 | 50.3 | 52.6 | 4311 | 16781 | 16761 | 51.3 | 47.6 | 0.9 | 416 | 75.1 | 41.1 | 36 | 52.8 |
| 792 | 1812 | 9929 | 9946 | 50 | 50 | 4312 | 10183 | 10165 | 51.7 | 47.4 | 1.6 | 255 | 75.3 | 43.9 | 36 | 52.8 |
| 793 | 1813 | 12236 | 12256 | 51.2 | 42.9 | 4313 | 13000 | 12981 | 51.1 | 45 | 0.1 | 765 | 76.4 | 42.5 | 36 | 53.9 |
| 794 | 1814 | 3231 | 3252 | 52.7 | 45.5 | 4314 | 3650 | 3631 | 53.1 | 50 | 0.4 | 420 | 75.4 | 41.7 | 36 | 53.7 |
| 795 | 1815 | 11541 | 11560 | 50.1 | 45 | 4315 | 11727 | 11708 | 50.4 | 45 | 0.3 | 187 | 73 | 40.6 | 36 | 51.2 |
| 796 | 1816 | 3232 | 3252 | 51.1 | 47.6 | 4316 | 3494 | 3473 | 50.4 | 40.9 | 0.7 | 263 | 74.3 | 41.4 | 36 | 52.3 |
| 797 | 1817 | 7725 | 7743 | 50.8 | 47.4 | 4317 | 8054 | 8035 | 50.4 | 50 | 0.4 | 330 | 75 | 41.8 | 36 | 52.7 |
| 798 | 1818 | 28968 | 28988 | 50.9 | 47.6 | 4318 | 29358 | 29339 | 52.8 | 50 | 2 | 391 | 76.4 | 44.5 | 36 | 53.9 |
| 799 | 1819 | 11545 | 11563 | 50.8 | 47.4 | 4319 | 12257 | 12237 | 51.3 | 47.6 | 0.5 | 713 | 76.2 | 42.1 | 36 | 53.7 |
| 800 | 1820 | 24417 | 24436 | 52.6 | 50 | 4320 | 25080 | 25062 | 53.5 | 52.6 | 0.9 | 664 | 75.8 | 41.3 | 36 | 53.9 |
| 801 | 1821 | 28968 | 28989 | 51.5 | 45.5 | 4321 | 29358 | 29339 | 52.8 | 50 | 1.3 | 391 | 76.4 | 44.5 | 36 | 54.1 |
| 802 | 1822 | 3789 | 3808 | 53.5 | 50 | 4322 | 4318 | 4294 | 54.4 | 40 | 0.9 | 530 | 75.5 | 41.1 | 36 | 54 |
| 803 | 1823 | 3232 | 3252 | 51.1 | 47.6 | 4323 | 3646 | 3625 | 52 | 40.9 | 0.9 | 415 | 75.3 | 41.4 | 36 | 53.1 |
| 804 | 1824 | 3232 | 3252 | 51.1 | 47.6 | 4324 | 3647 | 3628 | 50.6 | 45 | 0.5 | 416 | 75.3 | 41.6 | 36 | 53 |
| 805 | 1825 | 28971 | 28993 | 51.9 | 43.5 | 4325 | 29306 | 29288 | 53.5 | 52.6 | 1.6 | 336 | 76.2 | 44.6 | 36 | 54 |
| 806 | 1826 | 24179 | 24200 | 53.3 | 40.9 | 4326 | 24818 | 24797 | 51.6 | 40.9 | 1.6 | 640 | 75.8 | 41.2 | 36 | 53.6 |
| 807 | 1827 | 3231 | 3251 | 52 | 47.6 | 4327 | 3650 | 3631 | 53.1 | 50 | 1.1 | 420 | 75.4 | 41.7 | 36 | 53.5 |
| 808 | 1828 | 9930 | 9950 | 52.6 | 47.6 | 4328 | 10449 | 10425 | 54.6 | 40 | 2 | 520 | 75.4 | 41 | 36 | 53.7 |
| 809 | 1829 | 8866 | 8885 | 51.1 | 45 | 4329 | 9254 | 9236 | 50.6 | 47.4 | 0.5 | 389 | 75 | 41.1 | 36 | 52.8 |
| 810 | 1830 | 2522 | 2541 | 51.4 | 45 | 4330 | 2672 | 2653 | 51.6 | 50 | 0.2 | 151 | 75.3 | 48.3 | 36 | 53.2 |
| 811 | 1831 | 11541 | 11561 | 50.9 | 42.9 | 4331 | 12258 | 12238 | 50.3 | 42.9 | 0.6 | 718 | 76.2 | 41.9 | 36 | 53.5 |
| 812 | 1832 | 3232 | 3251 | 50.3 | 50 | 4332 | 3646 | 3625 | 52 | 40.9 | 1.7 | 415 | 75.3 | 41.4 | 36 | 52.9 |
| 813 | 1833 | 3232 | 3251 | 50.3 | 50 | 4333 | 3647 | 3628 | 50.6 | 45 | 0.3 | 416 | 75.3 | 41.6 | 36 | 52.9 |
| 814 | 1834 | 23843 | 23863 | 50.3 | 42.9 | 4334 | 24527 | 24508 | 50.5 | 45 | 0.2 | 685 | 76 | 41.8 | 36 | 53.4 |
| 815 | 1835 | 21210 | 21228 | 53.2 | 52.6 | 4335 | 21317 | 21293 | 53.2 | 40 | 0 | 108 | 71.1 | 42.6 | 36 | 50.8 |
| 816 | 1836 | 3229 | 3249 | 51.4 | 47.6 | 4336 | 3650 | 3631 | 53.1 | 50 | 1.7 | 422 | 75.4 | 41.7 | 36 | 53.3 |
| 817 | 1837 | 3230 | 3249 | 50.1 | 45 | 4337 | 3494 | 3473 | 50.4 | 40.9 | 0.3 | 265 | 74.2 | 41.1 | 36 | 52.1 |
| 818 | 1838 | 2371 | 2389 | 50.3 | 47.4 | 4338 | 2997 | 2976 | 51.4 | 40.9 | 1.1 | 627 | 76.7 | 43.5 | 36 | 53.9 |
| 819 | 1839 | 29186 | 29206 | 51.3 | 42.9 | 4339 | 29298 | 29280 | 51.4 | 52.6 | 0.1 | 113 | 72.8 | 46 | 36 | 51.5 |
| 820 | 1840 | 9929 | 9946 | 50 | 50 | 4340 | 10455 | 10435 | 50.5 | 42.9 | 0.4 | 527 | 75.3 | 40.6 | 36 | 52.8 |
| 821 | 1841 | 9351 | 9370 | 51.2 | 50 | 4341 | 9989 | 9968 | 51 | 40.9 | 0.2 | 639 | 75.4 | 40.4 | 36 | 53.2 |
| 822 | 1842 | 25348 | 25365 | 50.4 | 50 | 4342 | 25772 | 25753 | 51.9 | 50 | 1.5 | 425 | 74.9 | 40.5 | 36 | 52.6 |
| 823 | 1843 | 1402 | 1422 | 50.2 | 42.9 | 4343 | 2103 | 2082 | 52 | 45.5 | 1.8 | 702 | 76.7 | 43.3 | 36 | 53.8 |
| 824 | 1844 | 9929 | 9946 | 50 | 50 | 4344 | 10608 | 10589 | 51 | 50 | 0.9 | 680 | 75.8 | 41.2 | 36 | 53.2 |
| 825 | 1845 | 9934 | 9953 | 50.7 | 50 | 4345 | 10608 | 10589 | 51 | 50 | 0.3 | 675 | 75.8 | 41.2 | 36 | 53.4 |
| 826 | 1846 | 13176 | 13196 | 51.4 | 47.6 | 4346 | 13544 | 13525 | 52.6 | 55 | 1.2 | 369 | 77.1 | 46.3 | 36 | 54.5 |
| 827 | 1847 | 7725 | 7743 | 50.8 | 47.4 | 4347 | 8189 | 8170 | 50.6 | 50 | 0.2 | 465 | 75.6 | 41.9 | 36 | 53.2 |
| 828 | 1848 | 7725 | 7743 | 50.8 | 47.4 | 4348 | 8190 | 8172 | 50.3 | 47.4 | 0.6 | 466 | 75.6 | 41.8 | 36 | 53.1 |
| 829 | 1849 | 18074 | 18093 | 50.3 | 45 | 4349 | 18662 | 18641 | 50.4 | 40.9 | 0.1 | 589 | 76.2 | 42.6 | 36 | 53.6 |
| 830 | 1850 | 18074 | 18093 | 50.3 | 45 | 4350 | 18632 | 18611 | 50.2 | 40.9 | 0.1 | 559 | 76.2 | 42.8 | 36 | 53.5 |
| 831 | 1851 | 29200 | 29222 | 53.2 | 43.5 | 4351 | 29306 | 29288 | 53.5 | 52.6 | 0.3 | 107 | 73.1 | 47.7 | 36 | 52.3 |
| 832 | 1852 | 25348 | 25366 | 51.2 | 47.4 | 4352 | 25545 | 25526 | 51.7 | 45 | 0.5 | 198 | 74.1 | 42.9 | 36 | 52.3 |
| 833 | 1853 | 25348 | 25366 | 51.2 | 47.4 | 4353 | 25545 | 25525 | 52.3 | 42.9 | 1.1 | 198 | 74.1 | 42.9 | 36 | 52.3 |
| 834 | 1854 | 29200 | 29223 | 53.7 | 41.7 | 4354 | 29306 | 29288 | 53.5 | 52.6 | 0.2 | 107 | 73.1 | 47.7 | 36 | 52.3 |
| 835 | 1855 | 25347 | 25366 | 52.7 | 50 | 4355 | 25545 | 25521 | 54.5 | 40 | 1.8 | 199 | 74.2 | 43.2 | 36 | 52.9 |
| 836 | 1856 | 3792 | 3811 | 54 | 55 | 4356 | 4447 | 4425 | 53 | 43.5 | 1 | 656 | 75.5 | 40.5 | 36 | 53.9 |
| 837 | 1857 | 29200 | 29224 | 54.2 | 40 | 4357 | 29306 | 29288 | 53.5 | 52.6 | 0.7 | 107 | 73.1 | 47.7 | 36 | 52.3 |
| 838 | 1858 | 985 | 1004 | 51.1 | 50 | 4358 | 1483 | 1465 | 50.5 | 47.4 | 0.6 | 499 | 76.4 | 43.5 | 36 | 53.7 |
| 839 | 1859 | 2427 | 2445 | 52.1 | 52.6 | 4359 | 3189 | 3168 | 51 | 45.5 | 1.1 | 763 | 76.7 | 43.1 | 36 | 54.1 |
| 840 | 1860 | 13701 | 13725 | 53.6 | 40 | 4360 | 14084 | 14060 | 53.6 | 40 | 0.1 | 384 | 74.6 | 40.1 | 36 | 53.4 |
| 841 | 1861 | 985 | 1004 | 51.1 | 50 | 4361 | 1483 | 1464 | 51.3 | 45 | 0.2 | 499 | 76.4 | 43.5 | 36 | 53.9 |
| 842 | 1862 | 8794 | 8813 | 51.6 | 45 | 4362 | 9559 | 9539 | 50.6 | 42.9 | 1 | 766 | 75.9 | 41.3 | 37 | 53.4 |
| 843 | 1863 | 3789 | 3806 | 50 | 50 | 4363 | 4435 | 4417 | 50.5 | 52.6 | 0.4 | 647 | 75.5 | 40.5 | 37 | 52.9 |
| 844 | 1864 | 13177 | 13197 | 50.3 | 42.9 | 4364 | 13314 | 13297 | 51 | 50 | 0.6 | 138 | 72.8 | 43.5 | 37 | 51.2 |
| 845 | 1865 | 3791 | 3808 | 50 | 50 | 4365 | 4435 | 4417 | 50.5 | 52.6 | 0.4 | 645 | 75.4 | 40.5 | 37 | 52.9 |
| 846 | 1866 | 9139 | 9159 | 52.5 | 47.6 | 4366 | 9364 | 9346 | 53.9 | 52.6 | 1.4 | 226 | 74.9 | 43.8 | 37 | 53.3 |
| 847 | 1867 | 3226 | 3245 | 51.7 | 55 | 4367 | 3494 | 3473 | 50.4 | 40.9 | 1.3 | 269 | 74.5 | 41.6 | 37 | 52.4 |
| 848 | 1868 | 13040 | 13059 | 50.9 | 50 | 4368 | 13314 | 13297 | 51 | 50 | 0.1 | 275 | 75.6 | 44.4 | 37 | 53.3 |
| 849 | 1869 | 2522 | 2541 | 51.4 | 45 | 4369 | 2891 | 2873 | 50.8 | 47.4 | 0.6 | 370 | 76 | 43.8 | 37 | 53.6 |
| 850 | 1870 | 8865 | 8884 | 50.4 | 45 | 4370 | 9245 | 9226 | 50 | 45 | 0.4 | 381 | 74.9 | 40.9 | 37 | 52.6 |
| 851 | 1871 | 3787 | 3804 | 50 | 50 | 4371 | 4434 | 4416 | 51.5 | 52.6 | 1.4 | 648 | 75.4 | 40.3 | 37 | 52.9 |
| 852 | 1872 | 3226 | 3245 | 51.7 | 55 | 4372 | 3646 | 3625 | 52 | 40.9 | 0.3 | 421 | 75.3 | 41.6 | 37 | 53.4 |
| 853 | 1873 | 3226 | 3245 | 51.7 | 55 | 4373 | 3647 | 3628 | 50.6 | 45 | 1.1 | 422 | 75.4 | 41.7 | 37 | 53.1 |
| 854 | 1874 | 3226 | 3245 | 51.7 | 55 | 4374 | 3650 | 3631 | 53.1 | 50 | 1.4 | 425 | 75.5 | 41.9 | 37 | 53.5 |
| 855 | 1875 | 2387 | 2405 | 51.6 | 52.6 | 4375 | 2747 | 2727 | 50 | 42.9 | 1.6 | 361 | 76.9 | 46 | 37 | 53.9 |
| 856 | 1876 | 18074 | 18093 | 50.3 | 45 | 4376 | 18229 | 18209 | 50.1 | 42.9 | 0.2 | 156 | 73.2 | 42.9 | 37 | 51.4 |
| 857 | 1877 | 13701 | 13725 | 53.6 | 40 | 4377 | 14059 | 14040 | 52.8 | 50 | 0.8 | 359 | 74.5 | 40.1 | 37 | 53.1 |
| 858 | 1878 | 3787 | 3804 | 50 | 50 | 4378 | 4435 | 4417 | 50.5 | 52.6 | 0.4 | 649 | 75.4 | 40.4 | 37 | 52.9 |
| 859 | 1879 | 13040 | 13059 | 50.9 | 50 | 4379 | 13323 | 13304 | 51.1 | 45 | 0.2 | 284 | 75.7 | 44.4 | 37 | 53.4 |
| 860 | 1880 | 3789 | 3806 | 50 | 50 | 4380 | 4434 | 4416 | 51.5 | 52.6 | 1.4 | 646 | 75.4 | 40.4 | 37 | 52.9 |
| 861 | 1881 | 15506 | 15527 | 50.8 | 40.9 | 4381 | 16214 | 16196 | 51.8 | 52.6 | 1 | 709 | 75.5 | 40.3 | 37 | 53.2 |
| 862 | 1882 | 12234 | 12252 | 50.6 | 47.4 | 4382 | 12412 | 12392 | 50 | 42.9 | 0.6 | 179 | 73.1 | 41.3 | 37 | 51.3 |
| 863 | 1883 | 12234 | 12252 | 50.6 | 47.4 | 4383 | 12739 | 12718 | 51 | 40.9 | 0.4 | 506 | 75.8 | 42.1 | 37 | 53.4 |
| 864 | 1884 | 18074 | 18094 | 51.1 | 42.9 | 4384 | 18229 | 18209 | 50.1 | 42.9 | 0.9 | 156 | 73.2 | 42.9 | 37 | 51.4 |
| 865 | 1885 | 18075 | 18095 | 50.6 | 47.6 | 4385 | 18223 | 18206 | 51.8 | 50 | 1.2 | 149 | 73.3 | 43.6 | 37 | 51.6 |
| 866 | 1886 | 13040 | 13059 | 50.9 | 50 | 4386 | 13326 | 13306 | 50.7 | 42.9 | 0.2 | 287 | 75.7 | 44.3 | 37 | 53.3 |
| 867 | 1887 | 18080 | 18098 | 51.2 | 52.6 | 4387 | 18233 | 18215 | 51.3 | 52.6 | 0.1 | 154 | 73.9 | 44.8 | 37 | 52.2 |
| 868 | 1888 | 18080 | 18098 | 51.2 | 52.6 | 4388 | 18233 | 18214 | 52 | 50 | 0.9 | 154 | 73.9 | 44.8 | 37 | 52.2 |
| 869 | 1889 | 18080 | 18098 | 51.2 | 52.6 | 4389 | 18231 | 18210 | 52.2 | 45.5 | 1 | 152 | 73.5 | 44.1 | 37 | 51.9 |
| 870 | 1890 | 18080 | 18098 | 51.2 | 52.6 | 4390 | 18223 | 18206 | 51.8 | 50 | 0.6 | 144 | 73.2 | 43.8 | 37 | 51.7 |
| 871 | 1891 | 18077 | 18098 | 52.9 | 50 | 4391 | 18220 | 18202 | 54.8 | 52.6 | 1.9 | 144 | 73.2 | 43.8 | 37 | 52.2 |
| 872 | 1892 | 18076 | 18098 | 54.4 | 47.8 | 4392 | 18443 | 18424 | 55.9 | 55 | 1.5 | 368 | 75.8 | 43.2 | 37 | 54.5 |
| 873 | 1893 | 3792 | 3810 | 52.9 | 52.6 | 4393 | 4436 | 4417 | 52.2 | 50 | 0.6 | 645 | 75.4 | 40.5 | 37 | 53.6 |
| 874 | 1894 | 3055 | 3074 | 51.1 | 50 | 4394 | 3647 | 3628 | 50.6 | 45 | 0.5 | 593 | 76.3 | 42.7 | 37 | 53.7 |
| 875 | 1895 | 3055 | 3074 | 51.1 | 50 | 4395 | 3646 | 3625 | 52 | 40.9 | 0.9 | 592 | 76.2 | 42.6 | 37 | 53.8 |
| 876 | 1896 | 15506 | 15527 | 50.8 | 40.9 | 4396 | 15645 | 15625 | 51.1 | 42.9 | 0.4 | 140 | 71.8 | 40.7 | 37 | 50.6 |
| 877 | 1897 | 18081 | 18099 | 51.2 | 52.6 | 4397 | 18229 | 18209 | 50.1 | 42.9 | 1.1 | 149 | 73.3 | 43.6 | 37 | 51.4 |
| 878 | 1898 | 13039 | 13058 | 51.8 | 50 | 4398 | 13155 | 13138 | 50.4 | 50 | 1.4 | 117 | 73.4 | 47 | 37 | 51.6 |
| 879 | 1899 | 3055 | 3075 | 51.8 | 47.6 | 4399 | 3650 | 3631 | 53.1 | 50 | 1.3 | 596 | 76.3 | 42.8 | 37 | 54.1 |
| 880 | 1900 | 18080 | 18099 | 53 | 50 | 4400 | 18223 | 18205 | 53.3 | 52.6 | 0.4 | 144 | 73.2 | 43.8 | 37 | 52.2 |
| 881 | 1901 | 27361 | 27380 | 52.4 | 55 | 4401 | 27579 | 27558 | 51.1 | 40.9 | 1.3 | 219 | 75.4 | 45.2 | 37 | 53.2 |
| 882 | 1902 | 3221 | 3239 | 51.5 | 52.6 | 4402 | 3503 | 3484 | 51.5 | 50 | 0 | 283 | 74.8 | 42 | 37 | 52.9 |
| 883 | 1903 | 3221 | 3239 | 51.5 | 52.6 | 4403 | 3504 | 3485 | 50.4 | 45 | 1.1 | 284 | 74.7 | 41.9 | 37 | 52.5 |
| 884 | 1904 | 18077 | 18099 | 54.4 | 47.8 | 4404 | 18220 | 18201 | 56.1 | 55 | 1.7 | 144 | 73.2 | 43.8 | 37 | 52.6 |
| 885 | 1905 | 3055 | 3075 | 51.8 | 47.6 | 4405 | 3647 | 3628 | 50.6 | 45 | 1.2 | 593 | 76.3 | 42.7 | 37 | 53.7 |
| 886 | 1906 | 18581 | 18599 | 51.4 | 47.4 | 4406 | 18697 | 18679 | 51.9 | 52.6 | 0.4 | 117 | 71 | 41 | 37 | 50.2 |
| 887 | 1907 | 18616 | 18636 | 51.4 | 47.6 | 4407 | 19216 | 19195 | 50.2 | 40.9 | 1.1 | 601 | 75.6 | 41.1 | 37 | 53.1 |
| 888 | 1908 | 3219 | 3238 | 50.7 | 50 | 4408 | 3503 | 3484 | 51.5 | 50 | 0.8 | 285 | 74.8 | 42.1 | 37 | 52.7 |
| 889 | 1909 | 18696 | 18715 | 51.7 | 50 | 4409 | 19216 | 19195 | 50.2 | 40.9 | 1.5 | 521 | 75.5 | 41.3 | 37 | 53 |
| 890 | 1910 | 3219 | 3238 | 50.7 | 50 | 4410 | 3504 | 3485 | 50.4 | 45 | 0.3 | 286 | 74.7 | 42 | 37 | 52.5 |
| 891 | 1911 | 27366 | 27384 | 52.2 | 52.6 | 4411 | 27573 | 27552 | 52.3 | 40.9 | 0.1 | 208 | 74.6 | 43.8 | 37 | 53 |
| 892 | 1912 | 27366 | 27384 | 52.2 | 52.6 | 4412 | 27567 | 27547 | 51.1 | 42.9 | 1 | 202 | 74.6 | 44.1 | 37 | 52.7 |
| 893 | 1913 | 3055 | 3075 | 51.8 | 47.6 | 4413 | 3646 | 3625 | 52 | 40.9 | 0.2 | 592 | 76.2 | 42.6 | 37 | 54 |
| 894 | 1914 | 18704 | 18724 | 50.8 | 47.6 | 4414 | 19216 | 19195 | 50.2 | 40.9 | 0.5 | 513 | 75.5 | 41.1 | 37 | 53 |
| 895 | 1915 | 16874 | 16893 | 52.1 | 50 | 4415 | 17056 | 17035 | 51.8 | 45.5 | 0.4 | 183 | 74.4 | 44.3 | 37 | 52.7 |
| 896 | 1916 | 12234 | 12252 | 50.6 | 47.4 | 4416 | 12739 | 12719 | 50.3 | 42.9 | 0.3 | 506 | 75.8 | 42.1 | 37 | 53.3 |
| 897 | 1917 | 7728 | 7746 | 51.7 | 52.6 | 4417 | 8054 | 8035 | 50.4 | 50 | 1.2 | 327 | 75 | 41.9 | 37 | 52.7 |
| 898 | 1918 | 15506 | 15527 | 50.8 | 40.9 | 4418 | 15647 | 15628 | 51 | 45 | 0.3 | 142 | 71.9 | 40.8 | 37 | 50.7 |
| 899 | 1919 | 985 | 1004 | 51.1 | 50 | 4419 | 1773 | 1755 | 51.7 | 52.6 | 0.6 | 789 | 76.7 | 43.1 | 37 | 54.1 |
| 900 | 1920 | 3217 | 3236 | 51.1 | 50 | 4420 | 3503 | 3484 | 51.5 | 50 | 0.4 | 287 | 74.8 | 42.2 | 37 | 52.8 |
| 901 | 1921 | 3791 | 3808 | 50 | 50 | 4421 | 4434 | 4416 | 51.5 | 52.6 | 1.4 | 644 | 75.4 | 40.4 | 37 | 52.9 |
| 902 | 1922 | 19794 | 19813 | 50 | 50 | 4422 | 19923 | 19904 | 50.1 | 50 | 0.1 | 130 | 72.7 | 43.8 | 37 | 51 |
| 903 | 1923 | 13039 | 13058 | 51.8 | 50 | 4423 | 13178 | 13157 | 50.4 | 40.9 | 1.5 | 140 | 73.8 | 45.7 | 37 | 51.9 |
| 904 | 1924 | 13033 | 13051 | 52.1 | 52.6 | 4424 | 13155 | 13138 | 50.4 | 50 | 1.7 | 123 | 73.7 | 47.2 | 37 | 51.8 |
| 905 | 1925 | 12233 | 12251 | 51.1 | 52.6 | 4425 | 12739 | 12719 | 50.3 | 42.9 | 0.9 | 507 | 75.9 | 42.2 | 37 | 53.3 |
| 906 | 1926 | 19795 | 19814 | 50.4 | 45 | 4426 | 19923 | 19903 | 50.9 | 47.6 | 0.4 | 129 | 72.5 | 43.4 | 37 | 51 |
| 907 | 1927 | 13177 | 13197 | 50.3 | 42.9 | 4427 | 13946 | 13929 | 51.5 | 50 | 1.2 | 770 | 75.9 | 41 | 37 | 53.3 |
| 908 | 1928 | 3799 | 3820 | 52.9 | 45.5 | 4428 | 4318 | 4294 | 54.4 | 40 | 1.5 | 520 | 75.4 | 41 | 37 | 53.7 |
| 909 | 1929 | 8867 | 8887 | 52.3 | 47.6 | 4429 | 9364 | 9346 | 53.9 | 52.6 | 1.6 | 498 | 75.8 | 42.2 | 37 | 53.9 |
| 910 | 1930 | 1472 | 1491 | 51.2 | 45 | 4430 | 2152 | 2133 | 50.7 | 45 | 0.5 | 681 | 76.5 | 42.9 | 37 | 53.8 |
| 911 | 1931 | 12233 | 12251 | 51.1 | 52.6 | 4431 | 12739 | 12718 | 51 | 40.9 | 0.2 | 507 | 75.9 | 42.2 | 37 | 53.5 |
| 912 | 1932 | 3055 | 3076 | 52.4 | 45.5 | 4432 | 3650 | 3631 | 53.1 | 50 | 0.7 | 596 | 76.3 | 42.8 | 37 | 54.2 |
| 913 | 1933 | 12726 | 12746 | 51.3 | 47.6 | 4433 | 13325 | 13305 | 50.5 | 47.6 | 0.7 | 600 | 76.7 | 43.7 | 37 | 53.9 |
| 914 | 1934 | 8867 | 8887 | 52.3 | 47.6 | 4434 | 9316 | 9296 | 50.8 | 42.9 | 1.5 | 450 | 75.4 | 41.6 | 37 | 53.1 |
| 915 | 1935 | 8867 | 8887 | 52.3 | 47.6 | 4435 | 9314 | 9295 | 51.1 | 50 | 1.2 | 448 | 75.5 | 41.7 | 37 | 53.3 |
| 916 | 1936 | 8867 | 8887 | 52.3 | 47.6 | 4436 | 9313 | 9294 | 50.4 | 50 | 1.9 | 447 | 75.5 | 41.6 | 37 | 53 |
| 917 | 1937 | 3055 | 3076 | 52.4 | 45.5 | 4437 | 3647 | 3628 | 50.6 | 45 | 1.8 | 593 | 76.3 | 42.7 | 37 | 53.7 |
| 918 | 1938 | 13176 | 13196 | 51.4 | 47.6 | 4438 | 13312 | 13294 | 51 | 52.6 | 0.4 | 137 | 72.9 | 43.8 | 37 | 51.5 |
| 919 | 1939 | 12726 | 12746 | 51.3 | 47.6 | 4439 | 13155 | 13138 | 50.4 | 50 | 0.9 | 430 | 76.4 | 44 | 37 | 53.7 |
| 920 | 1940 | 13701 | 13724 | 53.1 | 41.7 | 4440 | 14058 | 14040 | 51.4 | 52.6 | 1.7 | 358 | 74.5 | 40.2 | 37 | 52.7 |
| 921 | 1941 | 8372 | 8390 | 50.7 | 47.4 | 4441 | 9101 | 9081 | 50.5 | 47.6 | 0.2 | 730 | 75.5 | 40.3 | 37 | 53.1 |
| 922 | 1942 | 3055 | 3076 | 52.4 | 45.5 | 4442 | 3646 | 3625 | 52 | 40.9 | 0.4 | 592 | 76.2 | 42.6 | 37 | 54.1 |
| 923 | 1943 | 887 | 905 | 50.1 | 47.4 | 4443 | 1493 | 1474 | 50.8 | 45 | 0.7 | 607 | 77.1 | 44.6 | 37 | 54.1 |
| 924 | 1944 | 1046 | 1063 | 50.3 | 50 | 4444 | 1697 | 1677 | 51 | 42.9 | 0.7 | 652 | 76.9 | 43.9 | 37 | 54 |
| 925 | 1945 | 27378 | 27397 | 50.5 | 45 | 4445 | 27675 | 27656 | 50 | 40 | 0.5 | 298 | 74.1 | 40.3 | 37 | 52 |
| 926 | 1946 | 27378 | 27397 | 50.5 | 45 | 4446 | 27674 | 27654 | 51.9 | 42.9 | 1.4 | 297 | 74.2 | 40.4 | 37 | 52.2 |
| 927 | 1947 | 2671 | 2692 | 52.1 | 40.9 | 4447 | 3056 | 3037 | 52.1 | 55 | 0 | 386 | 74.8 | 40.7 | 37 | 53.1 |
| 928 | 1948 | 1046 | 1063 | 50.3 | 50 | 4448 | 1697 | 1678 | 50.3 | 45 | 0.1 | 652 | 76.9 | 43.9 | 37 | 54 |
| 929 | 1949 | 2387 | 2405 | 51.6 | 52.6 | 4449 | 2672 | 2654 | 50.9 | 52.6 | 0.8 | 286 | 77 | 47.6 | 37 | 54.3 |
| 930 | 1950 | 3792 | 3810 | 52.9 | 52.6 | 4450 | 4565 | 4542 | 53.9 | 41.7 | 1 | 774 | 75.6 | 40.3 | 37 | 53.8 |
| 931 | 1951 | 15506 | 15527 | 50.8 | 40.9 | 4451 | 15647 | 15629 | 50.3 | 47.4 | 0.5 | 142 | 71.9 | 40.8 | 37 | 50.5 |
| 932 | 1952 | 8794 | 8813 | 51.6 | 45 | 4452 | 9560 | 9540 | 51.6 | 42.9 | 0 | 767 | 75.9 | 41.2 | 37 | 53.7 |
| 933 | 1953 | 19801 | 19819 | 53.2 | 52.6 | 4453 | 19909 | 19885 | 52.5 | 40 | 0.7 | 109 | 71.4 | 43.1 | 37 | 50.8 |
| 934 | 1954 | 19988 | 20006 | 50.4 | 47.4 | 4454 | 20615 | 20597 | 50.6 | 47.4 | 0.2 | 628 | 75.3 | 40.1 | 37 | 52.9 |
| 935 | 1955 | 19991 | 20009 | 52.8 | 52.6 | 4455 | 20616 | 20597 | 52.3 | 45 | 0.5 | 626 | 75.3 | 40.1 | 37 | 53.5 |
| 936 | 1956 | 16875 | 16895 | 51.6 | 47.6 | 4456 | 17060 | 17041 | 51.1 | 50 | 0.5 | 186 | 74.6 | 44.6 | 37 | 52.6 |
| 937 | 1957 | 16875 | 16895 | 51.6 | 47.6 | 4457 | 17059 | 17039 | 50.6 | 47.6 | 1 | 185 | 74.4 | 44.3 | 37 | 52.4 |
| 938 | 1958 | 16875 | 16895 | 51.6 | 47.6 | 4458 | 17056 | 17035 | 51.8 | 45.5 | 0.2 | 182 | 74.2 | 44 | 37 | 52.5 |
| 939 | 1959 | 27442 | 27461 | 51.5 | 40 | 4459 | 27541 | 27521 | 51.7 | 47.6 | 0.1 | 100 | 71.2 | 44 | 37 | 50.4 |
| 940 | 1960 | 16875 | 16896 | 52.2 | 45.5 | 4460 | 17060 | 17041 | 51.1 | 50 | 1.1 | 186 | 74.6 | 44.6 | 37 | 52.6 |
| 941 | 1961 | 23841 | 23859 | 50.5 | 52.6 | 4461 | 24527 | 24507 | 51 | 42.9 | 0.5 | 687 | 76.1 | 41.9 | 37 | 53.5 |
| 942 | 1962 | 23841 | 23859 | 50.5 | 52.6 | 4462 | 24093 | 24075 | 50.9 | 52.6 | 0.4 | 253 | 76 | 45.8 | 37 | 53.5 |
| 943 | 1963 | 16875 | 16896 | 52.2 | 45.5 | 4463 | 17059 | 17039 | 50.6 | 47.6 | 1.6 | 185 | 74.4 | 44.3 | 37 | 52.4 |
| 944 | 1964 | 16875 | 16896 | 52.2 | 45.5 | 4464 | 17056 | 17035 | 51.8 | 45.5 | 0.5 | 182 | 74.2 | 44 | 37 | 52.6 |
| 945 | 1965 | 23843 | 23863 | 50.3 | 42.9 | 4465 | 24093 | 24075 | 50.9 | 52.6 | 0.5 | 251 | 75.8 | 45.4 | 37 | 53.3 |
| 946 | 1966 | 16875 | 16896 | 52.2 | 45.5 | 4466 | 17041 | 17023 | 53.5 | 52.6 | 1.3 | 167 | 73.8 | 43.7 | 37 | 52.4 |
| 947 | 1967 | 28187 | 28205 | 53.1 | 52.6 | 4467 | 28673 | 28654 | 53.5 | 55 | 0.5 | 487 | 80 | 52.4 | 37 | 57 |
| 948 | 1968 | 28190 | 28208 | 51.7 | 52.6 | 4468 | 28672 | 28654 | 50.6 | 52.6 | 1.2 | 483 | 79.9 | 52.2 | 37 | 56.2 |
| 949 | 1969 | 24030 | 24047 | 50.7 | 50 | 4469 | 24527 | 24508 | 50.5 | 45 | 0.2 | 498 | 75.4 | 41.2 | 37 | 53 |
| 950 | 1970 | 24031 | 24050 | 56.5 | 55 | 4470 | 24816 | 24792 | 54.7 | 40 | 1.8 | 786 | 76.3 | 42 | 37 | 54.9 |
| 951 | 1971 | 7880 | 7900 | 50.3 | 42.9 | 4471 | 8049 | 8032 | 50.4 | 50 | 0 | 170 | 72.8 | 41.2 | 37 | 51.2 |
| 952 | 1972 | 24096 | 24119 | 54.4 | 41.7 | 4472 | 24815 | 24791 | 54.5 | 40 | 0.1 | 720 | 75.8 | 41 | 37 | 54.5 |
| 953 | 1973 | 17790 | 17811 | 51.6 | 40.9 | 4473 | 18233 | 18214 | 52 | 50 | 0.4 | 444 | 75.1 | 40.8 | 37 | 53.2 |
| 954 | 1974 | 24174 | 24194 | 50.9 | 42.9 | 4474 | 24938 | 24921 | 50.4 | 50 | 0.5 | 765 | 75.8 | 40.9 | 37 | 53.3 |
| 955 | 1975 | 16875 | 16896 | 52.2 | 45.5 | 4475 | 17039 | 17022 | 51.4 | 50 | 0.8 | 165 | 73.7 | 43.6 | 37 | 52.1 |
| 956 | 1976 | 24174 | 24195 | 52.5 | 40.9 | 4476 | 24936 | 24919 | 51.8 | 50 | 0.7 | 763 | 75.8 | 41 | 37 | 53.7 |
| 957 | 1977 | 24179 | 24198 | 51 | 45 | 4477 | 24938 | 24921 | 50.4 | 50 | 0.6 | 760 | 75.8 | 40.9 | 37 | 53.3 |
| 958 | 1978 | 16875 | 16896 | 52.2 | 45.5 | 4478 | 17038 | 17021 | 50.7 | 50 | 1.6 | 164 | 73.8 | 43.9 | 37 | 52 |
| 959 | 1979 | 24180 | 24199 | 50.3 | 40 | 4479 | 24936 | 24919 | 51.8 | 50 | 1.5 | 757 | 75.8 | 41 | 37 | 53.2 |
| 960 | 1980 | 2823 | 2844 | 50.4 | 45.5 | 4480 | 3186 | 3165 | 50.4 | 40.9 | 0 | 364 | 75.5 | 42.6 | 37 | 53.1 |
| 961 | 1981 | 10142 | 10163 | 51.3 | 40.9 | 4481 | 10608 | 10589 | 51 | 50 | 0.3 | 467 | 74.9 | 40 | 37 | 52.8 |
| 962 | 1982 | 1046 | 1063 | 50.3 | 50 | 4482 | 1483 | 1464 | 51.3 | 45 | 0.9 | 438 | 76.2 | 43.6 | 37 | 53.6 |
| 963 | 1983 | 17388 | 17408 | 50.7 | 42.9 | 4483 | 17501 | 17481 | 51.2 | 42.9 | 0.6 | 114 | 70.5 | 40.4 | 37 | 49.7 |
| 964 | 1984 | 24179 | 24200 | 53.3 | 40.9 | 4484 | 24740 | 24717 | 52.5 | 41.7 | 0.8 | 562 | 76 | 42.2 | 37 | 54 |
| 965 | 1985 | 24379 | 24398 | 55 | 55 | 4485 | 25088 | 25070 | 54.5 | 52.6 | 0.5 | 710 | 75.9 | 41.3 | 37 | 54.6 |
| 966 | 1986 | 24379 | 24398 | 55 | 55 | 4486 | 25087 | 25069 | 53.7 | 52.6 | 1.3 | 709 | 75.9 | 41.3 | 37 | 54.3 |
| 967 | 1987 | 16874 | 16893 | 52.1 | 50 | 4487 | 17059 | 17039 | 50.6 | 47.6 | 1.5 | 186 | 74.6 | 44.6 | 37 | 52.5 |
| 968 | 1988 | 24380 | 24399 | 55 | 55 | 4488 | 25088 | 25070 | 54.5 | 52.6 | 0.5 | 709 | 75.9 | 41.3 | 37 | 54.6 |
| 969 | 1989 | 28522 | 28542 | 50.2 | 42.9 | 4489 | 28671 | 28653 | 50.2 | 52.6 | 0 | 150 | 76.2 | 50.7 | 37 | 53.5 |
| 970 | 1990 | 16874 | 16893 | 52.1 | 50 | 4490 | 17060 | 17041 | 51.1 | 50 | 1 | 187 | 74.7 | 44.9 | 37 | 52.7 |
| 971 | 1991 | 24380 | 24399 | 55 | 55 | 4491 | 25087 | 25069 | 53.7 | 52.6 | 1.3 | 708 | 75.9 | 41.4 | 37 | 54.4 |
| 972 | 1992 | 17608 | 17627 | 50.2 | 45 | 4492 | 18239 | 18220 | 50 | 45 | 0.2 | 632 | 75.3 | 40.2 | 37 | 52.8 |
| 973 | 1993 | 17608 | 17627 | 50.2 | 45 | 4493 | 18238 | 18219 | 50.3 | 45 | 0.1 | 631 | 75.3 | 40.3 | 37 | 52.9 |
| 974 | 1994 | 1046 | 1063 | 50.3 | 50 | 4494 | 1483 | 1465 | 50.5 | 47.4 | 0.2 | 438 | 76.2 | 43.6 | 37 | 53.6 |
| 975 | 1995 | 17608 | 17628 | 50.9 | 42.9 | 4495 | 18239 | 18220 | 50 | 45 | 0.9 | 632 | 75.3 | 40.2 | 37 | 52.8 |
| 976 | 1996 | 17608 | 17628 | 50.9 | 42.9 | 4496 | 18238 | 18219 | 50.3 | 45 | 0.7 | 631 | 75.3 | 40.3 | 37 | 52.9 |
| 977 | 1997 | 8063 | 8084 | 51.4 | 45.5 | 4497 | 8188 | 8169 | 50.5 | 45 | 0.9 | 126 | 72.1 | 42.9 | 37 | 50.7 |
| 978 | 1998 | 12236 | 12256 | 51.2 | 42.9 | 4498 | 12739 | 12718 | 51 | 40.9 | 0.2 | 504 | 75.8 | 42.1 | 37 | 53.5 |
| 979 | 1999 | 13176 | 13196 | 51.4 | 47.6 | 4499 | 13325 | 13305 | 50.5 | 47.6 | 0.8 | 150 | 73.4 | 44 | 37 | 51.7 |
| 980 | 2000 | 2371 | 2389 | 50.3 | 47.4 | 4500 | 2749 | 2728 | 50.3 | 45.5 | 0 | 379 | 76.9 | 45.9 | 37 | 54.1 |
| 981 | 2001 | 9402 | 9420 | 51.3 | 47.4 | 4501 | 9989 | 9968 | 51 | 40.9 | 0.4 | 588 | 75.4 | 40.5 | 37 | 53.1 |
| 982 | 2002 | 9931 | 9950 | 50.2 | 45 | 4502 | 10183 | 10166 | 50.9 | 50 | 0.7 | 253 | 75.2 | 43.9 | 37 | 52.8 |
| 983 | 2003 | 2387 | 2405 | 51.6 | 52.6 | 4503 | 2997 | 2976 | 51.4 | 40.9 | 0.2 | 611 | 76.6 | 43.5 | 37 | 54.2 |
| 984 | 2004 | 3788 | 3805 | 50 | 50 | 4504 | 4435 | 4417 | 50.5 | 52.6 | 0.4 | 648 | 75.4 | 40.4 | 37 | 52.9 |
| 985 | 2005 | 26039 | 26057 | 52.6 | 52.6 | 4505 | 26650 | 26630 | 51.4 | 42.9 | 1.2 | 612 | 75.3 | 40.4 | 37 | 53.3 |
| 986 | 2006 | 2371 | 2389 | 50.3 | 47.4 | 4506 | 3053 | 3034 | 50.3 | 50 | 0 | 683 | 76.7 | 43.3 | 37 | 53.9 |
| 987 | 2007 | 3 | 21 | 53.4 | 52.6 | 4507 | 315 | 296 | 51.9 | 50 | 1.5 | 313 | 76.9 | 46.6 | 37 | 54.5 |
| 988 | 2008 | 2371 | 2389 | 50.3 | 47.4 | 4508 | 3056 | 3037 | 52.1 | 55 | 1.7 | 686 | 76.7 | 43.4 | 37 | 53.9 |
| 989 | 2009 | 13040 | 13059 | 50.9 | 50 | 4509 | 13155 | 13137 | 52.1 | 52.6 | 1.2 | 116 | 73.2 | 46.6 | 37 | 51.6 |
| 990 | 2010 | 9931 | 9950 | 50.2 | 45 | 4510 | 10183 | 10165 | 51.7 | 47.4 | 1.5 | 253 | 75.2 | 43.9 | 37 | 52.8 |
| 991 | 2011 | 3788 | 3805 | 50 | 50 | 4511 | 4434 | 4416 | 51.5 | 52.6 | 1.4 | 647 | 75.4 | 40.3 | 37 | 52.9 |
| 992 | 2012 | 13176 | 13196 | 51.4 | 47.6 | 4512 | 13946 | 13929 | 51.5 | 50 | 0.2 | 771 | 75.9 | 41.1 | 37 | 53.6 |
| 993 | 2013 | 3772 | 3792 | 51.2 | 42.9 | 4513 | 4444 | 4424 | 50.6 | 42.9 | 0.7 | 673 | 75.6 | 40.7 | 37 | 53.2 |
| 994 | 2014 | 13176 | 13196 | 51.4 | 47.6 | 4514 | 13320 | 13300 | 51.4 | 47.6 | 0 | 145 | 73.3 | 44.1 | 37 | 51.9 |
| 995 | 2015 | 8861 | 8880 | 50.2 | 45 | 4515 | 9245 | 9226 | 50 | 45 | 0.1 | 385 | 74.9 | 40.8 | 37 | 52.5 |
| 996 | 2016 | 8868 | 8889 | 50.4 | 40.9 | 4516 | 9310 | 9291 | 51.2 | 45 | 0.8 | 443 | 75.3 | 41.3 | 37 | 52.9 |
| 997 | 2017 | 16366 | 16384 | 50.3 | 52.6 | 4517 | 16774 | 16752 | 52.2 | 43.5 | 1.9 | 409 | 75.1 | 41.1 | 37 | 52.8 |
| 998 | 2018 | 9934 | 9953 | 50.7 | 50 | 4518 | 10183 | 10166 | 50.9 | 50 | 0.2 | 250 | 75.2 | 44 | 37 | 53 |
| 999 | 2019 | 9055 | 9079 | 52.8 | 40 | 4519 | 9342 | 9323 | 52.1 | 50 | 0.8 | 288 | 75.1 | 42.7 | 37 | 53.3 |
| 1000 | 2020 | 8868 | 8889 | 50.4 | 40.9 | 4520 | 9249 | 9231 | 50.8 | 47.4 | 0.4 | 382 | 75.1 | 41.4 | 37 | 52.8 |
| 1001 | 2021 | 16366 | 16385 | 52.9 | 55 | 4521 | 16774 | 16752 | 52.2 | 43.5 | 0.6 | 409 | 75.1 | 41.1 | 37 | 53.3 |
| 1002 | 2022 | 8868 | 8889 | 50.4 | 40.9 | 4522 | 9249 | 9230 | 51.5 | 45 | 1.1 | 382 | 75.1 | 41.4 | 37 | 52.8 |
| 1003 | 2023 | 9934 | 9953 | 50.7 | 50 | 4523 | 10183 | 10165 | 51.7 | 47.4 | 0.9 | 250 | 75.2 | 44 | 37 | 53 |
| 1004 | 2024 | 25772 | 25793 | 52.4 | 40.9 | 4524 | 26183 | 26163 | 51.7 | 42.9 | 0.7 | 412 | 74.8 | 40.3 | 37 | 53 |
| 1005 | 2025 | 13039 | 13057 | 51.1 | 52.6 | 4525 | 13155 | 13138 | 50.4 | 50 | 0.7 | 117 | 73.4 | 47 | 37 | 51.6 |
| 1006 | 2026 | 25771 | 25790 | 51.1 | 45 | 4526 | 26183 | 26164 | 51 | 45 | 0.1 | 413 | 74.8 | 40.4 | 37 | 52.8 |
| 1007 | 2027 | 25769 | 25786 | 50.3 | 50 | 4527 | 26183 | 26163 | 51.7 | 42.9 | 1.4 | 415 | 74.9 | 40.5 | 37 | 52.6 |
| 1008 | 2028 | 3794 | 3812 | 52.9 | 52.6 | 4528 | 4436 | 4417 | 52.2 | 50 | 0.6 | 643 | 75.4 | 40.4 | 37 | 53.6 |
| 1009 | 2029 | 887 | 905 | 50.1 | 47.4 | 4529 | 1480 | 1462 | 51.6 | 47.4 | 1.5 | 594 | 77.1 | 44.6 | 37 | 54.1 |
| 1010 | 2030 | 3794 | 3812 | 52.9 | 52.6 | 4530 | 4434 | 4416 | 51.5 | 52.6 | 1.4 | 641 | 75.4 | 40.4 | 37 | 53.3 |
| 1011 | 2031 | 12370 | 12388 | 50.1 | 47.4 | 4531 | 12994 | 12976 | 50.3 | 47.4 | 0.3 | 625 | 76.4 | 42.9 | 37 | 53.6 |
| 1012 | 2032 | 3797 | 3815 | 50.9 | 47.4 | 4532 | 4186 | 4168 | 51.8 | 52.6 | 0.9 | 390 | 75.3 | 41.8 | 37 | 53.1 |
| 1013 | 2033 | 3795 | 3813 | 52.1 | 52.6 | 4533 | 4435 | 4417 | 50.5 | 52.6 | 1.6 | 641 | 75.5 | 40.6 | 37 | 53.1 |
| 1014 | 2034 | 3795 | 3813 | 52.1 | 52.6 | 4534 | 4434 | 4416 | 51.5 | 52.6 | 0.6 | 640 | 75.4 | 40.5 | 37 | 53.3 |
| 1015 | 2035 | 13177 | 13197 | 50.3 | 42.9 | 4535 | 13323 | 13304 | 51.1 | 45 | 0.8 | 147 | 73.2 | 43.5 | 37 | 51.4 |
| 1016 | 2036 | 1046 | 1064 | 51.2 | 47.4 | 4536 | 1401 | 1382 | 50.6 | 45 | 0.6 | 356 | 75.6 | 43 | 37 | 53.2 |
| 1017 | 2037 | 16549 | 16567 | 54.9 | 52.6 | 4537 | 17057 | 17035 | 53 | 43.5 | 1.9 | 509 | 75.9 | 42.2 | 37 | 54.1 |
| 1018 | 2038 | 1046 | 1064 | 51.2 | 47.4 | 4538 | 1483 | 1464 | 51.3 | 45 | 0.1 | 438 | 76.2 | 43.6 | 37 | 53.8 |
| 1019 | 2039 | 16551 | 16568 | 51.1 | 50 | 4539 | 17056 | 17035 | 51.8 | 45.5 | 0.7 | 506 | 75.9 | 42.3 | 37 | 53.6 |
| 1020 | 2040 | 1046 | 1064 | 51.2 | 47.4 | 4540 | 1483 | 1465 | 50.5 | 47.4 | 0.6 | 438 | 76.2 | 43.6 | 37 | 53.6 |
| 1021 | 2041 | 1046 | 1064 | 51.2 | 47.4 | 4541 | 1484 | 1466 | 53.1 | 52.6 | 2 | 439 | 76.3 | 43.7 | 37 | 53.9 |
| 1022 | 2042 | 1046 | 1064 | 51.2 | 47.4 | 4542 | 1697 | 1676 | 51.7 | 40.9 | 0.5 | 652 | 76.9 | 43.9 | 37 | 54.2 |
| 1023 | 2043 | 1046 | 1064 | 51.2 | 47.4 | 4543 | 1697 | 1677 | 51 | 42.9 | 0.2 | 652 | 76.9 | 43.9 | 37 | 54.2 |
| 1024 | 2044 | 16555 | 16572 | 50.3 | 50 | 4544 | 17111 | 17090 | 51.1 | 40.9 | 0.8 | 557 | 76.1 | 42.5 | 37 | 53.5 |
| 1025 | 2045 | 1046 | 1064 | 51.2 | 47.4 | 4545 | 1697 | 1678 | 50.3 | 45 | 0.9 | 652 | 76.9 | 43.9 | 37 | 54 |
| 1026 | 2046 | 1046 | 1063 | 50.3 | 50 | 4546 | 1401 | 1382 | 50.6 | 45 | 0.2 | 356 | 75.6 | 43 | 37 | 53.1 |
| 1027 | 2047 | 3796 | 3814 | 50.8 | 52.6 | 4547 | 4435 | 4417 | 50.5 | 52.6 | 0.3 | 640 | 75.4 | 40.5 | 37 | 53.1 |
| 1028 | 2048 | 12232 | 12250 | 51.9 | 52.6 | 4548 | 12993 | 12975 | 51.4 | 47.4 | 0.5 | 762 | 76.5 | 42.5 | 37 | 54 |
| 1029 | 2049 | 12236 | 12256 | 51.2 | 42.9 | 4549 | 12739 | 12719 | 50.3 | 42.9 | 0.9 | 504 | 75.8 | 42.1 | 37 | 53.2 |
| 1030 | 2050 | 28937 | 28956 | 52.4 | 50 | 4550 | 29306 | 29288 | 53.5 | 52.6 | 1.1 | 370 | 76.6 | 45.1 | 37 | 54.4 |
| 1031 | 2051 | 12232 | 12250 | 51.9 | 52.6 | 4551 | 12996 | 12977 | 50.2 | 40 | 1.7 | 765 | 76.4 | 42.4 | 37 | 53.6 |
| 1032 | 2052 | 3234 | 3254 | 51.1 | 47.6 | 4552 | 3504 | 3485 | 50.4 | 45 | 0.7 | 271 | 74.4 | 41.3 | 37 | 52.3 |
| 1033 | 2053 | 3234 | 3254 | 51.1 | 47.6 | 4553 | 3503 | 3484 | 51.5 | 50 | 0.4 | 270 | 74.4 | 41.5 | 37 | 52.5 |
| 1034 | 2054 | 9922 | 9941 | 51.3 | 50 | 4554 | 10670 | 10649 | 51.3 | 40.9 | 0.1 | 749 | 75.8 | 40.9 | 37 | 53.5 |
| 1035 | 2055 | 3792 | 3810 | 52.9 | 52.6 | 4555 | 4434 | 4416 | 51.5 | 52.6 | 1.4 | 643 | 75.4 | 40.4 | 37 | 53.3 |
| 1036 | 2056 | 3234 | 3254 | 51.1 | 47.6 | 4556 | 3494 | 3473 | 50.4 | 40.9 | 0.6 | 261 | 74.1 | 41 | 37 | 52.1 |
| 1037 | 2057 | 4255 | 4276 | 51.7 | 45.5 | 4557 | 4608 | 4590 | 51.5 | 52.6 | 0.2 | 354 | 74.7 | 40.7 | 37 | 52.8 |
| 1038 | 2058 | 24562 | 24580 | 50.1 | 52.6 | 4558 | 24936 | 24919 | 51.8 | 50 | 1.7 | 375 | 75.6 | 42.7 | 37 | 53 |
| 1039 | 2059 | 24562 | 24580 | 50.1 | 52.6 | 4559 | 24938 | 24921 | 50.4 | 50 | 0.3 | 377 | 75.5 | 42.4 | 37 | 53 |
| 1040 | 2060 | 24562 | 24580 | 50.1 | 52.6 | 4560 | 25182 | 25164 | 51.4 | 47.4 | 1.3 | 621 | 75.9 | 41.7 | 37 | 53.3 |
| 1041 | 2061 | 24559 | 24579 | 52 | 52.4 | 4561 | 24936 | 24919 | 51.8 | 50 | 0.2 | 378 | 75.7 | 42.9 | 37 | 53.6 |
| 1042 | 2062 | 24559 | 24579 | 52 | 52.4 | 4562 | 24938 | 24921 | 50.4 | 50 | 1.6 | 380 | 75.6 | 42.6 | 37 | 53.1 |
| 1043 | 2063 | 1046 | 1063 | 50.3 | 50 | 4563 | 1697 | 1676 | 51.7 | 40.9 | 1.3 | 652 | 76.9 | 43.9 | 37 | 54 |
| 1044 | 2064 | 24482 | 24503 | 51.6 | 40.9 | 4564 | 24815 | 24792 | 53.4 | 41.7 | 1.8 | 334 | 75.4 | 42.8 | 37 | 53.4 |
| 1045 | 2065 | 13177 | 13197 | 50.3 | 42.9 | 4565 | 13326 | 13306 | 50.7 | 42.9 | 0.4 | 150 | 73.2 | 43.3 | 37 | 51.4 |
| 1046 | 2066 | 24480 | 24502 | 54.2 | 47.8 | 4566 | 24815 | 24791 | 54.5 | 40 | 0.3 | 336 | 75.6 | 43.2 | 37 | 54.3 |
| 1047 | 2067 | 17840 | 17859 | 50.8 | 45 | 4567 | 18223 | 18206 | 51.8 | 50 | 1 | 384 | 74.7 | 40.4 | 37 | 52.6 |
| 1048 | 2068 | 24480 | 24500 | 53.2 | 47.6 | 4568 | 24815 | 24792 | 53.4 | 41.7 | 0.2 | 336 | 75.6 | 43.2 | 37 | 54 |
| 1049 | 2069 | 17840 | 17859 | 50.8 | 45 | 4569 | 18231 | 18210 | 52.2 | 45.5 | 1.4 | 392 | 74.8 | 40.6 | 37 | 52.7 |
| 1050 | 2070 | 28821 | 28840 | 51.8 | 45 | 4570 | 29298 | 29279 | 52.6 | 55 | 0.8 | 478 | 77 | 45.2 | 37 | 54.6 |
| 1051 | 2071 | 24418 | 24440 | 55 | 47.8 | 4571 | 24517 | 24494 | 53.2 | 41.7 | 1.8 | 100 | 70.8 | 43 | 37 | 50.6 |
| 1052 | 2072 | 13701 | 13722 | 50.4 | 40.9 | 4572 | 14058 | 14040 | 51.4 | 52.6 | 1 | 358 | 74.5 | 40.2 | 37 | 52.4 |
| 1053 | 2073 | 28821 | 28840 | 51.8 | 45 | 4573 | 29358 | 29339 | 52.8 | 50 | 1 | 538 | 77.1 | 45 | 37 | 54.6 |
| 1054 | 2074 | 17792 | 17813 | 51.6 | 40.9 | 4574 | 18233 | 18214 | 52 | 50 | 0.4 | 442 | 75.1 | 40.7 | 37 | 53.1 |
| 1055 | 2075 | 24420 | 24440 | 50.8 | 42.9 | 4575 | 25079 | 25061 | 52.7 | 52.6 | 1.9 | 660 | 75.7 | 41.1 | 37 | 53.3 |
| 1056 | 2076 | 28821 | 28839 | 51.1 | 47.4 | 4576 | 29298 | 29279 | 52.6 | 55 | 1.5 | 478 | 77 | 45.2 | 37 | 54.3 |
| 1057 | 2077 | 3796 | 3814 | 50.8 | 52.6 | 4577 | 4434 | 4416 | 51.5 | 52.6 | 0.7 | 639 | 75.4 | 40.4 | 37 | 53.1 |
| 1058 | 2078 | 28821 | 28839 | 51.1 | 47.4 | 4578 | 29358 | 29339 | 52.8 | 50 | 1.7 | 538 | 77.1 | 45 | 37 | 54.4 |
| 1059 | 2079 | 28820 | 28838 | 53.7 | 52.6 | 4579 | 29298 | 29279 | 52.6 | 55 | 1.1 | 479 | 77.1 | 45.3 | 37 | 54.8 |
| 1060 | 2080 | 24418 | 24439 | 52.9 | 45.5 | 4580 | 25079 | 25061 | 52.7 | 52.6 | 0.2 | 662 | 75.8 | 41.2 | 37 | 54 |
| 1061 | 2081 | 28820 | 28838 | 53.7 | 52.6 | 4581 | 29358 | 29339 | 52.8 | 50 | 0.9 | 539 | 77.1 | 45.1 | 37 | 54.9 |
| 1062 | 2082 | 27369 | 27389 | 52.5 | 47.6 | 4582 | 27468 | 27451 | 51.1 | 50 | 1.4 | 100 | 71.2 | 44 | 38 | 50.3 |
| 1063 | 2083 | 7725 | 7742 | 50 | 50 | 4583 | 8187 | 8167 | 50.4 | 42.9 | 0.3 | 463 | 75.6 | 41.9 | 38 | 53 |
| 1064 | 2084 | 16549 | 16567 | 54.9 | 52.6 | 4584 | 17040 | 17021 | 53.4 | 50 | 1.5 | 492 | 75.9 | 42.3 | 38 | 54.2 |
| 1065 | 2085 | 3221 | 3239 | 51.5 | 52.6 | 4585 | 3500 | 3481 | 51.2 | 50 | 0.3 | 280 | 74.6 | 41.8 | 38 | 52.7 |
| 1066 | 2086 | 16549 | 16567 | 54.9 | 52.6 | 4586 | 17041 | 17022 | 54.1 | 50 | 0.8 | 493 | 75.8 | 42.2 | 38 | 54.4 |
| 1067 | 2087 | 20138 | 20158 | 50.1 | 42.9 | 4587 | 20615 | 20597 | 50.6 | 47.4 | 0.5 | 478 | 75 | 40.4 | 38 | 52.7 |
| 1068 | 2088 | 20078 | 20099 | 50.5 | 40.9 | 4588 | 20615 | 20597 | 50.6 | 47.4 | 0.1 | 538 | 75.3 | 40.5 | 38 | 52.9 |
| 1069 | 2089 | 13039 | 13057 | 51.1 | 52.6 | 4589 | 13325 | 13305 | 50.5 | 47.6 | 0.6 | 287 | 75.8 | 44.6 | 38 | 53.3 |
| 1070 | 2090 | 16549 | 16567 | 54.9 | 52.6 | 4590 | 17041 | 17023 | 53.5 | 52.6 | 1.4 | 493 | 75.8 | 42.2 | 38 | 54.2 |
| 1071 | 2091 | 13701 | 13725 | 53.6 | 40 | 4591 | 14124 | 14106 | 52.4 | 52.6 | 1.2 | 424 | 75.1 | 41 | 38 | 53.4 |
| 1072 | 2092 | 12975 | 12993 | 51.4 | 47.4 | 4592 | 13320 | 13300 | 51.4 | 47.6 | 0 | 346 | 76.1 | 44.2 | 38 | 53.8 |
| 1073 | 2093 | 16548 | 16566 | 54.9 | 52.6 | 4593 | 16779 | 16758 | 53.5 | 50 | 1.4 | 232 | 74 | 41.4 | 38 | 52.9 |
| 1074 | 2094 | 3361 | 3381 | 50.5 | 42.9 | 4594 | 3500 | 3481 | 51.2 | 50 | 0.7 | 140 | 74.1 | 46.4 | 38 | 52.1 |
| 1075 | 2095 | 3361 | 3381 | 50.5 | 42.9 | 4595 | 3503 | 3484 | 51.5 | 50 | 1 | 143 | 74.4 | 46.9 | 38 | 52.3 |
| 1076 | 2096 | 16368 | 16387 | 50.2 | 45 | 4596 | 16780 | 16760 | 51.4 | 42.9 | 1.2 | 413 | 74.9 | 40.7 | 38 | 52.6 |
| 1077 | 2097 | 7725 | 7742 | 50 | 50 | 4597 | 8188 | 8168 | 50.4 | 42.9 | 0.3 | 464 | 75.6 | 41.8 | 38 | 53 |
| 1078 | 2098 | 8867 | 8887 | 52.3 | 47.6 | 4598 | 9597 | 9573 | 53.4 | 40 | 1.1 | 731 | 75.9 | 41.2 | 38 | 53.9 |
| 1079 | 2099 | 2223 | 2244 | 51.4 | 45.5 | 4599 | 2672 | 2654 | 50.9 | 52.6 | 0.5 | 450 | 77 | 45.3 | 38 | 54.3 |
| 1080 | 2100 | 10242 | 10265 | 51.2 | 41.7 | 4600 | 10605 | 10588 | 51.1 | 50 | 0.2 | 364 | 74.5 | 40.1 | 38 | 52.6 |
| 1081 | 2101 | 8867 | 8888 | 52.7 | 45.5 | 4601 | 9253 | 9235 | 51.6 | 47.4 | 1.1 | 387 | 75.1 | 41.3 | 38 | 53.2 |
| 1082 | 2102 | 3361 | 3381 | 50.5 | 42.9 | 4602 | 3504 | 3485 | 50.4 | 45 | 0.1 | 144 | 74.3 | 46.5 | 38 | 52.2 |
| 1083 | 2103 | 98 | 118 | 50.6 | 42.9 | 4603 | 314 | 296 | 50.6 | 47.4 | 0 | 217 | 75.9 | 46.5 | 38 | 53.4 |
| 1084 | 2104 | 12233 | 12251 | 51.1 | 52.6 | 4604 | 12498 | 12480 | 50 | 47.4 | 1.1 | 266 | 74.8 | 42.5 | 38 | 52.5 |
| 1085 | 2105 | 9926 | 9944 | 50.5 | 52.6 | 4605 | 10455 | 10434 | 51.1 | 40.9 | 0.6 | 530 | 75.3 | 40.6 | 38 | 52.9 |
| 1086 | 2106 | 3360 | 3380 | 51.4 | 42.9 | 4606 | 3497 | 3478 | 51.3 | 50 | 0.1 | 138 | 74 | 46.4 | 38 | 52.3 |
| 1087 | 2107 | 9926 | 9944 | 50.5 | 52.6 | 4607 | 10455 | 10435 | 50.5 | 42.9 | 0 | 530 | 75.3 | 40.6 | 38 | 52.9 |
| 1088 | 2108 | 10140 | 10159 | 52.4 | 50 | 4608 | 10608 | 10589 | 51 | 50 | 1.4 | 469 | 75 | 40.3 | 38 | 52.9 |
| 1089 | 2109 | 9931 | 9950 | 50.2 | 45 | 4609 | 10455 | 10435 | 50.5 | 42.9 | 0.3 | 525 | 75.3 | 40.6 | 38 | 52.8 |
| 1090 | 2110 | 3219 | 3238 | 50.7 | 50 | 4610 | 3500 | 3481 | 51.2 | 50 | 0.5 | 282 | 74.7 | 41.8 | 38 | 52.6 |
| 1091 | 2111 | 3219 | 3238 | 50.7 | 50 | 4611 | 3497 | 3478 | 51.3 | 50 | 0.6 | 279 | 74.7 | 41.9 | 38 | 52.6 |
| 1092 | 2112 | 3360 | 3380 | 51.4 | 42.9 | 4612 | 3500 | 3481 | 51.2 | 50 | 0.3 | 141 | 74 | 46.1 | 38 | 52.3 |
| 1093 | 2113 | 3360 | 3380 | 51.4 | 42.9 | 4613 | 3503 | 3484 | 51.5 | 50 | 0 | 144 | 74.3 | 46.5 | 38 | 52.5 |
| 1094 | 2114 | 2223 | 2244 | 51.4 | 45.5 | 4614 | 2672 | 2653 | 51.6 | 50 | 0.2 | 450 | 77 | 45.3 | 38 | 54.4 |
| 1095 | 2115 | 9922 | 9941 | 51.3 | 50 | 4615 | 10449 | 10428 | 51.9 | 40.9 | 0.7 | 528 | 75.4 | 40.9 | 38 | 53.3 |
| 1096 | 2116 | 13039 | 13057 | 51.1 | 52.6 | 4616 | 13312 | 13294 | 51 | 52.6 | 0.1 | 274 | 75.7 | 44.5 | 38 | 53.4 |
| 1097 | 2117 | 15951 | 15973 | 52.1 | 43.5 | 4617 | 16174 | 16154 | 50.4 | 42.9 | 1.7 | 224 | 73.5 | 40.6 | 38 | 51.7 |
| 1098 | 2118 | 13176 | 13196 | 51.4 | 47.6 | 4618 | 13545 | 13526 | 52.9 | 55 | 1.5 | 370 | 77 | 46.2 | 38 | 54.4 |
| 1099 | 2119 | 11541 | 11562 | 51.5 | 40.9 | 4619 | 11983 | 11965 | 53 | 52.6 | 1.5 | 443 | 75 | 40.6 | 38 | 53.1 |
| 1100 | 2120 | 2429 | 2447 | 50.2 | 47.4 | 4620 | 3056 | 3038 | 50.8 | 52.6 | 0.6 | 628 | 76.3 | 42.7 | 38 | 53.6 |
| 1101 | 2121 | 11545 | 11563 | 50.8 | 47.4 | 4621 | 12258 | 12238 | 50.3 | 42.9 | 0.5 | 714 | 76.2 | 42 | 38 | 53.5 |
| 1102 | 2122 | 8868 | 8889 | 50.4 | 40.9 | 4622 | 9245 | 9226 | 50 | 45 | 0.4 | 378 | 74.9 | 41 | 38 | 52.6 |
| 1103 | 2123 | 27361 | 27380 | 52.4 | 55 | 4623 | 27466 | 27448 | 52.3 | 52.6 | 0.1 | 106 | 72.5 | 46.2 | 38 | 51.5 |
| 1104 | 2124 | 8861 | 8880 | 50.2 | 45 | 4624 | 9340 | 9319 | 50.8 | 45.5 | 0.6 | 480 | 75.5 | 41.5 | 38 | 53 |
| 1105 | 2125 | 1784 | 1802 | 51.8 | 52.6 | 4625 | 2113 | 2094 | 50.1 | 45 | 1.7 | 330 | 76 | 44.2 | 38 | 53.3 |
| 1106 | 2126 | 8868 | 8889 | 50.4 | 40.9 | 4626 | 9107 | 9086 | 51.6 | 45.5 | 1.2 | 240 | 74 | 41.2 | 38 | 52 |
| 1107 | 2127 | 19795 | 19814 | 50.4 | 45 | 4627 | 20099 | 20078 | 50.5 | 40.9 | 0 | 305 | 74.4 | 40.7 | 38 | 52.3 |
| 1108 | 2128 | 26708 | 26731 | 54.2 | 41.7 | 4628 | 27347 | 27324 | 52.3 | 41.7 | 1.9 | 640 | 75.6 | 40.8 | 38 | 53.7 |
| 1109 | 2129 | 19794 | 19813 | 50 | 50 | 4629 | 19920 | 19899 | 50.2 | 40.9 | 0.2 | 127 | 72.3 | 43.3 | 38 | 50.7 |
| 1110 | 2130 | 3031 | 3051 | 51.3 | 52.4 | 4630 | 3650 | 3631 | 53.1 | 50 | 1.8 | 620 | 76.5 | 43.1 | 38 | 54 |
| 1111 | 2131 | 3031 | 3051 | 51.3 | 52.4 | 4631 | 3647 | 3628 | 50.6 | 45 | 0.7 | 617 | 76.4 | 42.9 | 38 | 53.8 |
| 1112 | 2132 | 19794 | 19813 | 50 | 50 | 4632 | 19922 | 19902 | 50 | 42.9 | 0 | 129 | 72.5 | 43.4 | 38 | 50.8 |
| 1113 | 2133 | 12236 | 12256 | 51.2 | 42.9 | 4633 | 12994 | 12976 | 50.3 | 47.4 | 0.8 | 759 | 76.4 | 42.4 | 38 | 53.7 |
| 1114 | 2134 | 26708 | 26731 | 54.2 | 41.7 | 4634 | 27467 | 27449 | 52.8 | 47.4 | 1.4 | 760 | 76 | 41.3 | 38 | 54.1 |
| 1115 | 2135 | 19716 | 19737 | 52.2 | 45.5 | 4635 | 19922 | 19901 | 51.5 | 45.5 | 0.7 | 207 | 73.5 | 41.1 | 38 | 52 |
| 1116 | 2136 | 19715 | 19735 | 52.5 | 47.6 | 4636 | 19922 | 19901 | 51.5 | 45.5 | 0.9 | 208 | 73.6 | 41.3 | 38 | 52.1 |
| 1117 | 2137 | 3360 | 3379 | 50.7 | 45 | 4637 | 3503 | 3484 | 51.5 | 50 | 0.7 | 144 | 74.3 | 46.5 | 38 | 52.3 |
| 1118 | 2138 | 9055 | 19079 | 52.8 | 40 | 4638 | 9364 | 9346 | 53.9 | 52.6 | 1.1 | 310 | 75.3 | 42.9 | 38 | 53.7 |
| 1119 | 2139 | 1782 | 1801 | 52.7 | 50 | 4639 | 1881 | 1861 | 54.5 | 52.4 | 1.8 | 100 | 72.4 | 47 | 38 | 51.6 |
| 1120 | 2140 | 26708 | 26727 | 50 | 45 | 4640 | 27468 | 27450 | 51.9 | 47.4 | 1.8 | 761 | 75.9 | 41.3 | 38 | 53.3 |
| 1121 | 2141 | 26708 | 26727 | 50 | 45 | 4641 | 27468 | 27451 | 51.1 | 50 | 1.1 | 761 | 75.9 | 41.3 | 38 | 53.3 |
| 1122 | 2142 | 4593 | 4613 | 51.5 | 47.6 | 4642 | 4995 | 4975 | 51.7 | 42.9 | 0.1 | 403 | 76 | 43.4 | 38 | 53.8 |
| 1123 | 2143 | 19709 | 19730 | 51.3 | 40.9 | 4643 | 19930 | 19911 | 50.7 | 50 | 0.5 | 222 | 74 | 41.9 | 38 | 52.1 |
| 1124 | 2144 | 26421 | 26441 | 51.5 | 42.9 | 4644 | 26587 | 26570 | 50.2 | 50 | 1.3 | 167 | 72.3 | 40.1 | 38 | 50.8 |
| 1125 | 2145 | 18979 | 19000 | 51.6 | 45.5 | 4645 | 19217 | 19195 | 51.7 | 43.5 | 0 | 239 | 73.5 | 40.2 | 38 | 52.1 |
| 1126 | 2146 | 18703 | 18724 | 53.5 | 50 | 4646 | 19476 | 19453 | 53.5 | 41.7 | 0 | 774 | 75.6 | 40.3 | 38 | 54 |
| 1127 | 2147 | 4255 | 4276 | 51.7 | 45.5 | 4647 | 4708 | 4690 | 50.3 | 47.4 | 1.4 | 454 | 75.1 | 40.7 | 38 | 52.8 |
| 1128 | 2148 | 3232 | 3252 | 51.1 | 47.6 | 4648 | 3503 | 3484 | 51.5 | 50 | 0.4 | 272 | 74.6 | 41.9 | 38 | 52.6 |
| 1129 | 2149 | 26421 | 26441 | 51.5 | 42.9 | 4649 | 26656 | 26636 | 51.3 | 47.6 | 0.2 | 236 | 74.2 | 41.9 | 38 | 52.5 |
| 1130 | 2150 | 3232 | 3252 | 51.1 | 47.6 | 4650 | 3504 | 3485 | 50.4 | 45 | 0.7 | 273 | 74.6 | 41.8 | 38 | 52.4 |
| 1131 | 2151 | 26421 | 26441 | 51.5 | 42.9 | 4651 | 26660 | 26641 | 50.2 | 50 | 1.3 | 240 | 74.2 | 41.7 | 38 | 52.1 |
| 1132 | 2152 | 26421 | 26441 | 51.5 | 42.9 | 4652 | 26683 | 26665 | 52.7 | 52.6 | 1.2 | 263 | 74.8 | 42.6 | 38 | 52.9 |
| 1133 | 2153 | 26421 | 26441 | 51.5 | 42.9 | 4653 | 26686 | 26669 | 50.5 | 50 | 0.9 | 266 | 74.8 | 42.5 | 38 | 52.6 |
| 1134 | 2154 | 26421 | 26441 | 51.5 | 42.9 | 4654 | 26691 | 26673 | 51.3 | 47.4 | 0.1 | 271 | 74.8 | 42.4 | 38 | 52.9 |
| 1135 | 2155 | 18704 | 18724 | 50.8 | 47.6 | 4655 | 19476 | 19456 | 50.5 | 42.9 | 0.3 | 773 | 75.5 | 40.2 | 38 | 53.1 |
| 1136 | 2156 | 18704 | 18724 | 50.8 | 47.6 | 4656 | 19482 | 19463 | 50.1 | 45 | 0.7 | 779 | 75.5 | 40.2 | 38 | 53 |
| 1137 | 2157 | 942 | 960 | 52.1 | 52.6 | 4657 | 1498 | 1481 | 51 | 50 | 1.1 | 557 | 76.9 | 44.5 | 38 | 54.3 |
| 1138 | 2158 | 942 | 960 | 52.1 | 52.6 | 4658 | 1497 | 1480 | 50.3 | 50 | 1.9 | 556 | 77 | 44.6 | 38 | 54.1 |
| 1139 | 2159 | 13040 | 13059 | 50.9 | 50 | 4659 | 13312 | 13294 | 51 | 52.6 | 0.1 | 273 | 75.6 | 44.3 | 38 | 53.3 |
| 1140 | 2160 | 18696 | 18715 | 51.7 | 50 | 4660 | 19476 | 19453 | 53.5 | 41.7 | 1.8 | 781 | 75.6 | 40.3 | 38 | 53.5 |
| 1141 | 2161 | 18696 | 18715 | 51.7 | 50 | 4661 | 19476 | 19456 | 50.5 | 42.9 | 1.3 | 781 | 75.6 | 40.3 | 38 | 53.1 |
| 1142 | 2162 | 3232 | 3251 | 50.3 | 50 | 4662 | 3503 | 3484 | 51.5 | 50 | 1.1 | 272 | 74.6 | 41.9 | 38 | 52.4 |
| 1143 | 2163 | 3031 | 3051 | 51.3 | 52.4 | 4663 | 3646 | 3625 | 52 | 40.9 | 0.7 | 616 | 76.4 | 42.9 | 38 | 54 |
| 1144 | 2164 | 9130 | 9150 | 51.3 | 42.9 | 4664 | 9560 | 9541 | 50.9 | 45 | 0.4 | 431 | 75.3 | 41.3 | 38 | 53 |
| 1145 | 2165 | 18224 | 18243 | 53.1 | 50 | 4665 | 18696 | 18672 | 53.9 | 40 | 0.8 | 473 | 75.7 | 42.1 | 38 | 54 |
| 1146 | 2166 | 18224 | 18243 | 53.1 | 50 | 4666 | 18696 | 18673 | 53.4 | 41.7 | 0.3 | 473 | 75.7 | 42.1 | 38 | 54 |
| 1147 | 2167 | 18225 | 18243 | 51.4 | 52.6 | 4667 | 18697 | 18679 | 51.9 | 52.6 | 0.5 | 473 | 75.8 | 42.3 | 38 | 53.6 |
| 1148 | 2168 | 9130 | 9150 | 51.3 | 42.9 | 4668 | 9560 | 9540 | 51.6 | 42.9 | 0.3 | 431 | 75.3 | 41.3 | 38 | 53.2 |
| 1149 | 2169 | 8866 | 8885 | 51.1 | 45 | 4669 | 9252 | 9235 | 50.1 | 50 | 1 | 387 | 75.1 | 41.3 | 38 | 52.7 |
| 1150 | 2170 | 9130 | 9150 | 51.3 | 42.9 | 4670 | 9559 | 9539 | 50.6 | 42.9 | 0.7 | 430 | 75.3 | 41.4 | 38 | 53 |
| 1151 | 2171 | 12267 | 12290 | 54.5 | 41.7 | 4671 | 12501 | 12480 | 53.5 | 45.5 | 1 | 235 | 74.3 | 42.1 | 38 | 53.2 |
| 1152 | 2172 | 3427 | 3446 | 52.7 | 50 | 4672 | 3650 | 3631 | 53.1 | 50 | 0.4 | 224 | 74.3 | 42.4 | 38 | 52.9 |
| 1153 | 2173 | 3427 | 3446 | 52.7 | 50 | 4673 | 3648 | 3628 | 52.3 | 42.9 | 0.4 | 222 | 74 | 41.9 | 38 | 52.6 |
| 1154 | 2174 | 26039 | 26058 | 54 | 55 | 4674 | 26184 | 26164 | 52.4 | 42.9 | 1.6 | 146 | 71.8 | 40.4 | 38 | 51.1 |
| 1155 | 2175 | 3230 | 3249 | 50.1 | 45 | 4675 | 3503 | 3484 | 51.5 | 50 | 1.4 | 274 | 74.5 | 41.6 | 38 | 52.3 |
| 1156 | 2176 | 3230 | 3249 | 50.1 | 45 | 4676 | 3504 | 3485 | 50.4 | 45 | 0.3 | 275 | 74.4 | 41.5 | 38 | 52.2 |
| 1157 | 2177 | 3427 | 3446 | 52.7 | 50 | 4677 | 3646 | 3625 | 52 | 40.9 | 0.6 | 220 | 74 | 41.8 | 38 | 52.5 |
| 1158 | 2178 | 3429 | 3449 | 50.4 | 42.9 | 4678 | 3647 | 3628 | 50.6 | 45 | 0.2 | 219 | 73.9 | 41.6 | 38 | 51.9 |
| 1159 | 2179 | 3429 | 3449 | 50.4 | 42.9 | 4679 | 3646 | 3625 | 52 | 40.9 | 1.6 | 218 | 73.7 | 41.3 | 38 | 51.8 |
| 1160 | 2180 | 8866 | 8885 | 51.1 | 45 | 4680 | 9249 | 9231 | 50.8 | 47.4 | 0.3 | 384 | 75.1 | 41.4 | 38 | 52.9 |
| 1161 | 2181 | 3428 | 3449 | 52.8 | 45.5 | 4681 | 3650 | 3631 | 53.1 | 50 | 0.3 | 223 | 74.2 | 42.2 | 38 | 52.8 |
| 1162 | 2182 | 18077 | 18098 | 52.9 | 50 | 4682 | 18696 | 18672 | 53.9 | 40 | 1 | 620 | 76.2 | 42.4 | 38 | 54.3 |
| 1163 | 2183 | 18078 | 18098 | 51.5 | 47.6 | 4683 | 18696 | 18673 | 53.4 | 41.7 | 1.9 | 619 | 76.2 | 42.3 | 38 | 53.9 |
| 1164 | 2184 | 8866 | 8885 | 51.1 | 45 | 4684 | 9249 | 9230 | 51.5 | 45 | 0.4 | 384 | 75.1 | 41.4 | 38 | 53 |
| 1165 | 2185 | 3229 | 3248 | 50.6 | 50 | 4685 | 3503 | 3484 | 51.5 | 50 | 0.8 | 275 | 74.6 | 41.8 | 38 | 52.5 |
| 1166 | 2186 | 12267 | 12290 | 54.5 | 41.7 | 4686 | 12495 | 12476 | 52.7 | 45 | 1.9 | 229 | 74.1 | 41.9 | 38 | 52.8 |
| 1167 | 2187 | 8220 | 8240 | 54 | 47.6 | 4687 | 8929 | 8910 | 54.5 | 55 | 0.4 | 710 | 75.4 | 40 | 38 | 54.1 |
| 1168 | 2188 | 18080 | 18098 | 51.2 | 52.6 | 4688 | 18238 | 18219 | 50.3 | 45 | 0.9 | 159 | 74 | 44.7 | 38 | 52 |
| 1169 | 2189 | 18080 | 18098 | 51.2 | 52.6 | 4689 | 18239 | 18220 | 50 | 45 | 1.2 | 160 | 73.9 | 44.4 | 38 | 51.8 |
| 1170 | 2190 | 18080 | 18098 | 51.2 | 52.6 | 4690 | 18697 | 18679 | 51.9 | 52.6 | 0.7 | 618 | 76.3 | 42.6 | 38 | 53.8 |
| 1171 | 2191 | 18076 | 18097 | 53.1 | 45.5 | 4691 | 18712 | 18693 | 54.8 | 55 | 1.7 | 637 | 76.3 | 42.5 | 38 | 54.4 |
| 1172 | 2192 | 8866 | 8885 | 51.1 | 45 | 4692 | 9245 | 9226 | 50 | 45 | 1.1 | 380 | 75 | 41.1 | 38 | 52.6 |
| 1173 | 2193 | 943 | 961 | 50.3 | 47.4 | 4693 | 1498 | 1481 | 51 | 50 | 0.8 | 556 | 76.9 | 44.4 | 38 | 54 |
| 1174 | 2194 | 18075 | 18095 | 50.6 | 47.6 | 4694 | 18642 | 18622 | 50.5 | 42.9 | 0.1 | 568 | 76.2 | 42.6 | 38 | 53.6 |
| 1175 | 2195 | 18075 | 18095 | 50.6 | 47.6 | 4695 | 18662 | 18641 | 50.4 | 40.9 | 0.2 | 588 | 76.3 | 42.7 | 38 | 53.6 |
| 1176 | 2196 | 8866 | 8885 | 51.1 | 45 | 4696 | 9107 | 9086 | 51.6 | 45.5 | 0.5 | 242 | 74.1 | 41.3 | 38 | 52.3 |
| 1177 | 2197 | 943 | 961 | 50.3 | 47.4 | 4697 | 1497 | 1480 | 50.3 | 50 | 0 | 555 | 76.9 | 44.5 | 38 | 54 |
| 1178 | 2198 | 7400 | 7417 | 50.2 | 50 | 4698 | 8190 | 8172 | 50.3 | 47.4 | 0.1 | 791 | 76.4 | 42.2 | 38 | 53.6 |
| 1179 | 2199 | 13039 | 13058 | 51.8 | 50 | 4699 | 13314 | 13297 | 51 | 50 | 0.9 | 276 | 75.7 | 44.6 | 38 | 53.4 |
| 1180 | 2200 | 7725 | 7743 | 50.8 | 47.4 | 4700 | 8187 | 8167 | 50.4 | 42.9 | 0.5 | 463 | 75.6 | 41.9 | 38 | 53.1 |
| 1181 | 2201 | 18074 | 18094 | 51.1 | 42.9 | 4701 | 18642 | 18622 | 50.5 | 42.9 | 0.5 | 569 | 76.2 | 42.5 | 38 | 53.6 |
| 1182 | 2202 | 25782 | 25805 | 52.1 | 41.7 | 4702 | 26174 | 26153 | 51 | 40.9 | 1.1 | 393 | 74.8 | 40.5 | 38 | 52.8 |
| 1183 | 2203 | 9131 | 9151 | 50.4 | 42.9 | 4703 | 9560 | 9541 | 50.9 | 45 | 0.5 | 430 | 75.3 | 41.4 | 38 | 52.9 |
| 1184 | 2204 | 25782 | 25805 | 52.1 | 41.7 | 4704 | 26183 | 26162 | 52.8 | 45.5 | 0.7 | 402 | 74.7 | 40.3 | 38 | 53.1 |
| 1185 | 2205 | 9131 | 9151 | 50.4 | 42.9 | 4705 | 9560 | 9540 | 51.6 | 42.9 | 1.2 | 430 | 75.3 | 41.4 | 38 | 52.9 |
| 1186 | 2206 | 7725 | 7743 | 50.8 | 47.4 | 4706 | 8188 | 8168 | 50.4 | 42.9 | 0.5 | 464 | 75.6 | 41.8 | 38 | 53.1 |
| 1187 | 2207 | 985 | 1004 | 51.1 | 50 | 4707 | 1494 | 1476 | 50.7 | 47.4 | 0.4 | 510 | 76.5 | 43.7 | 38 | 53.9 |
| 1188 | 2208 | 13039 | 13058 | 51.8 | 50 | 4708 | 13323 | 13304 | 51.1 | 45 | 0.7 | 285 | 75.8 | 44.6 | 38 | 53.5 |
| 1189 | 2209 | 9131 | 9151 | 50.4 | 42.9 | 4709 | 9559 | 9539 | 50.6 | 42.9 | 0.3 | 429 | 75.3 | 41.5 | 38 | 52.9 |
| 1190 | 2210 | 12352 | 12375 | 52.9 | 41.7 | 4710 | 12499 | 12480 | 51.8 | 45 | 1.1 | 148 | 73.3 | 43.9 | 38 | 52 |
| 1191 | 2211 | 3225 | 3244 | 52.4 | 55 | 4711 | 3646 | 3625 | 52 | 40.9 | 0.4 | 422 | 75.4 | 41.7 | 38 | 53.5 |
| 1192 | 2212 | 25676 | 25697 | 51.9 | 40.9 | 4712 | 25784 | 25765 | 53.3 | 50 | 1.4 | 109 | 70.3 | 40.4 | 38 | 49.9 |
| 1193 | 2213 | 25363 | 25381 | 51.1 | 52.6 | 4713 | 25548 | 25531 | 51.1 | 50 | 0 | 186 | 73.7 | 42.5 | 38 | 52 |
| 1194 | 2214 | 25363 | 25381 | 51.1 | 52.6 | 4714 | 25645 | 25626 | 50.8 | 45 | 0.4 | 283 | 74.2 | 40.6 | 38 | 52.3 |
| 1195 | 2215 | 18074 | 18093 | 50.3 | 45 | 4715 | 18642 | 18622 | 50.5 | 42.9 | 0.2 | 569 | 76.2 | 42.5 | 38 | 53.5 |
| 1196 | 2216 | 3225 | 3244 | 52.4 | 55 | 4716 | 3647 | 3628 | 50.6 | 45 | 1.8 | 423 | 75.5 | 41.8 | 38 | 53.1 |
| 1197 | 2217 | 3225 | 3244 | 52.4 | 55 | 4717 | 3650 | 3631 | 53.1 | 50 | 0.7 | 426 | 75.5 | 42 | 38 | 53.7 |
| 1198 | 2218 | 12352 | 12375 | 52.9 | 41.7 | 4718 | 12494 | 12476 | 52.2 | 47.4 | 0.6 | 143 | 73.2 | 44.1 | 38 | 52 |
| 1199 | 2219 | 13039 | 13058 | 51.8 | 50 | 4719 | 13326 | 13306 | 50.7 | 42.9 | 1.2 | 288 | 75.8 | 44.4 | 38 | 53.4 |
| 1200 | 2220 | 7617 | 7636 | 50.9 | 50 | 4720 | 8188 | 8169 | 50.5 | 45 | 0.5 | 572 | 76.1 | 42.3 | 38 | 53.5 |
| 1201 | 2221 | 988 | 1006 | 52.2 | 52.6 | 4721 | 1697 | 1678 | 50.3 | 45 | 2 | 710 | 76.9 | 43.8 | 38 | 54 |
| 1202 | 2222 | 12232 | 12250 | 51.9 | 52.6 | 4722 | 12739 | 12719 | 50.3 | 42.9 | 1.7 | 508 | 75.8 | 42.1 | 38 | 53.3 |
| 1203 | 2223 | 12232 | 12250 | 51.9 | 52.6 | 4723 | 12739 | 12718 | 51 | 40.9 | 1 | 508 | 75.8 | 42.1 | 38 | 53.5 |
| 1204 | 2224 | 988 | 1006 | 52.2 | 52.6 | 4724 | 1697 | 1677 | 51 | 42.9 | 1.2 | 710 | 76.9 | 43.8 | 38 | 54.2 |
| 1205 | 2225 | 8867 | 8886 | 50.7 | 50 | 4725 | 9341 | 9322 | 51.1 | 50 | 0.5 | 475 | 75.7 | 41.9 | 38 | 53.3 |
| 1206 | 2226 | 3223 | 3242 | 51.8 | 55 | 4726 | 3650 | 3631 | 53.1 | 50 | 1.3 | 428 | 75.6 | 42.1 | 38 | 53.6 |
| 1207 | 2227 | 8867 | 8886 | 50.7 | 50 | 4727 | 9340 | 9319 | 50.8 | 45.5 | 0.1 | 474 | 75.6 | 41.8 | 38 | 53.2 |
| 1208 | 2228 | 988 | 1006 | 52.2 | 52.6 | 4728 | 1697 | 1676 | 51.7 | 40.9 | 0.6 | 710 | 76.9 | 43.8 | 38 | 54.4 |
| 1209 | 2229 | 988 | 1006 | 52.2 | 52.6 | 4729 | 1694 | 1673 | 51.7 | 40.9 | 0.5 | 707 | 76.9 | 43.8 | 38 | 54.5 |
| 1210 | 2230 | 988 | 1006 | 52.2 | 52.6 | 4730 | 1494 | 1476 | 50.7 | 47.4 | 1.5 | 507 | 76.5 | 43.8 | 38 | 53.9 |
| 1211 | 2231 | 9931 | 9950 | 50.2 | 45 | 4731 | 10455 | 10434 | 51.1 | 40.9 | 1 | 525 | 75.3 | 40.6 | 38 | 52.8 |
| 1212 | 2232 | 3224 | 3242 | 50.5 | 52.6 | 4732 | 3646 | 3625 | 52 | 40.9 | 1.5 | 423 | 75.4 | 41.6 | 38 | 53 |
| 1213 | 2233 | 3224 | 3242 | 50.5 | 52.6 | 4733 | 3647 | 3628 | 50.6 | 45 | 0.1 | 424 | 75.4 | 41.7 | 38 | 53.1 |
| 1214 | 2234 | 3016 | 3036 | 50.2 | 42.9 | 4734 | 3187 | 3166 | 50.3 | 45.5 | 0.1 | 172 | 74.6 | 45.3 | 38 | 52.4 |
| 1215 | 2235 | 24559 | 24579 | 52 | 52.4 | 4735 | 25182 | 25164 | 51.4 | 47.4 | 0.6 | 624 | 76 | 41.8 | 38 | 53.7 |
| 1216 | 2236 | 1782 | 1802 | 53.3 | 47.6 | 4736 | 1881 | 1861 | 54.5 | 52.4 | 1.2 | 100 | 72.4 | 47 | 38 | 51.8 |
| 1217 | 2237 | 7880 | 7900 | 50.3 | 42.9 | 4737 | 8188 | 8169 | 50.5 | 45 | 0.1 | 309 | 74.8 | 41.7 | 38 | 52.6 |
| 1218 | 2238 | 8861 | 8880 | 50.2 | 45 | 4738 | 9248 | 9229 | 50.1 | 45 | 0 | 388 | 75 | 41 | 38 | 52.6 |
| 1219 | 2239 | 8868 | 8889 | 50.4 | 40.9 | 4739 | 9312 | 9293 | 50.6 | 45 | 0.1 | 445 | 75.3 | 41.3 | 38 | 53 |
| 1220 | 2240 | 17790 | 17813 | 54.3 | 41.7 | 4740 | 18220 | 18201 | 56.1 | 55 | 1.8 | 431 | 74.9 | 40.4 | 38 | 53.8 |
| 1221 | 2241 | 24569 | 24590 | 56.6 | 54.5 | 4741 | 25184 | 25164 | 55.9 | 52.4 | 0.7 | 616 | 75.9 | 41.7 | 38 | 55 |
| 1222 | 2242 | 13176 | 13196 | 51.4 | 47.6 | 4742 | 13328 | 13307 | 51.2 | 45.5 | 0.2 | 153 | 73.4 | 43.8 | 38 | 51.9 |
| 1223 | 2243 | 8861 | 8880 | 50.2 | 45 | 4743 | 9254 | 9236 | 50.6 | 47.4 | 0.4 | 394 | 74.9 | 40.9 | 38 | 52.6 |
| 1224 | 2244 | 24622 | 24643 | 57.1 | 54.5 | 4744 | 25400 | 25377 | 57.2 | 50 | 0.1 | 779 | 75.7 | 40.7 | 38 | 55.2 |
| 1225 | 2245 | 8868 | 8889 | 50.4 | 40.9 | 4745 | 9256 | 9237 | 50.8 | 45 | 0.4 | 389 | 75 | 41.1 | 38 | 52.7 |
| 1226 | 2246 | 3361 | 3381 | 50.5 | 42.9 | 4746 | 3497 | 3478 | 51.3 | 50 | 0.8 | 137 | 74.1 | 46.7 | 38 | 52.1 |
| 1227 | 2247 | 4593 | 4613 | 51.5 | 47.6 | 4747 | 4711 | 4693 | 50.4 | 47.4 | 1.1 | 119 | 71.5 | 42 | 38 | 50.2 |
| 1228 | 2248 | 19911 | 19930 | 50.7 | 50 | 4748 | 20615 | 20597 | 50.6 | 47.4 | 0.1 | 705 | 75.5 | 40.3 | 38 | 53.1 |
| 1229 | 2249 | 3221 | 3239 | 51.5 | 52.6 | 4749 | 3497 | 3478 | 51.3 | 50 | 0.2 | 277 | 74.6 | 41.9 | 38 | 52.7 |
| 1230 | 2250 | 3223 | 3241 | 50.2 | 52.6 | 4750 | 3504 | 3485 | 50.4 | 45 | 0.2 | 282 | 74.8 | 42.2 | 38 | 52.5 |
| 1231 | 2251 | 3223 | 3241 | 50.2 | 52.6 | 4751 | 3503 | 3484 | 51.5 | 50 | 1.2 | 281 | 74.9 | 42.3 | 38 | 52.6 |
| 1232 | 2252 | 3360 | 3380 | 51.4 | 42.9 | 4752 | 3504 | 3485 | 50.4 | 45 | 1 | 145 | 74.2 | 46.2 | 38 | 52.2 |
| 1233 | 2253 | 4593 | 4613 | 51.5 | 47.6 | 4753 | 4711 | 4692 | 51.2 | 45 | 0.3 | 119 | 71.5 | 42 | 38 | 50.5 |
| 1234 | 2254 | 4593 | 4613 | 51.5 | 47.6 | 4754 | 4710 | 4691 | 50.2 | 45 | 1.4 | 118 | 71.6 | 42.4 | 38 | 50.2 |
| 1235 | 2255 | 3016 | 3036 | 50.2 | 42.9 | 4755 | 3186 | 3165 | 50.4 | 40.9 | 0.2 | 171 | 74.4 | 45 | 38 | 52.3 |
| 1236 | 2256 | 29182 | 29206 | 55.4 | 44 | 4756 | 29301 | 29282 | 55.3 | 55 | 0.1 | 120 | 73.4 | 46.7 | 38 | 53.1 |
| 1237 | 2257 | 29183 | 29206 | 52.9 | 41.7 | 4757 | 29306 | 29287 | 54.6 | 55 | 1.7 | 124 | 73.3 | 46 | 38 | 52.3 |
| 1238 | 2258 | 29186 | 29206 | 51.3 | 42.9 | 4758 | 29298 | 29279 | 52.6 | 55 | 1.3 | 113 | 72.8 | 46 | 38 | 51.5 |
| 1239 | 2259 | 16979 | 17000 | 52.6 | 50 | 4759 | 17483 | 17465 | 54.4 | 52.6 | 1.8 | 505 | 75.9 | 42.2 | 38 | 54 |
| 1240 | 2260 | 29182 | 29205 | 54.6 | 41.7 | 4760 | 29298 | 29279 | 52.6 | 55 | 1.9 | 117 | 73.1 | 46.2 | 38 | 52 |
| 1241 | 2261 | 16981 | 17000 | 51.3 | 50 | 4761 | 17111 | 17090 | 51.1 | 40.9 | 0.2 | 131 | 74.5 | 48.1 | 38 | 52.6 |
| 1242 | 2262 | 13177 | 13197 | 50.3 | 42.9 | 4762 | 13949 | 13932 | 51.6 | 50 | 1.3 | 773 | 75.8 | 41 | 38 | 53.3 |
| 1243 | 2263 | 8867 | 8887 | 52.3 | 47.6 | 4763 | 9252 | 9234 | 51.4 | 52.6 | 0.9 | 386 | 75.1 | 41.5 | 38 | 53.1 |
| 1244 | 2264 | 24420 | 24440 | 50.8 | 42.9 | 4764 | 25081 | 25063 | 52.4 | 52.6 | 1.6 | 662 | 75.7 | 40.9 | 38 | 53.3 |
| 1245 | 2265 | 7727 | 7745 | 50.8 | 47.4 | 4765 | 8188 | 8169 | 50.5 | 45 | 0.4 | 462 | 75.6 | 41.8 | 38 | 53.1 |
| 1246 | 2266 | 2387 | 2405 | 51.6 | 52.6 | 4766 | 3055 | 3036 | 50.6 | 50 | 1.1 | 669 | 76.7 | 43.3 | 38 | 53.9 |
| 1247 | 2267 | 2671 | 2692 | 52.1 | 40.9 | 4767 | 3055 | 3036 | 50.6 | 50 | 1.5 | 385 | 74.8 | 40.5 | 38 | 52.6 |
| 1248 | 2268 | 29182 | 29202 | 51.2 | 42.9 | 4768 | 29298 | 29279 | 52.6 | 55 | 1.4 | 117 | 73.1 | 46.2 | 38 | 51.6 |
| 1249 | 2269 | 24418 | 24439 | 52.9 | 45.5 | 4769 | 25081 | 25063 | 52.4 | 52.6 | 0.5 | 664 | 75.7 | 41.1 | 38 | 53.8 |
| 1250 | 2270 | 12373 | 12391 | 50.8 | 47.4 | 4770 | 12992 | 12974 | 51.2 | 52.6 | 0.4 | 620 | 76.5 | 43.1 | 38 | 53.9 |
| 1251 | 2271 | 29179 | 29199 | 51.4 | 42.9 | 4771 | 29298 | 29279 | 52.6 | 55 | 1.2 | 120 | 73.4 | 46.7 | 38 | 51.9 |
| 1252 | 2272 | 1783 | 1803 | 54.2 | 47.6 | 4772 | 1882 | 1861 | 56 | 50 | 1.8 | 100 | 72.4 | 47 | 38 | 52 |
| 1253 | 2273 | 12373 | 12391 | 50.8 | 47.4 | 4773 | 12498 | 12480 | 50 | 47.4 | 0.7 | 126 | 72.8 | 44.4 | 38 | 51 |
| 1254 | 2274 | 7728 | 7746 | 51.7 | 52.6 | 4774 | 8190 | 8172 | 50.3 | 47.4 | 1.4 | 463 | 75.6 | 41.9 | 38 | 53.1 |
| 1255 | 2275 | 16875 | 16896 | 52.2 | 45.5 | 4775 | 17064 | 17045 | 51.4 | 50 | 0.8 | 190 | 74.5 | 44.2 | 38 | 52.7 |
| 1256 | 2276 | 1402 | 1425 | 52.8 | 41.7 | 4776 | 2103 | 2082 | 52 | 45.5 | 0.8 | 702 | 76.7 | 43.3 | 38 | 54.4 |
| 1257 | 2277 | 28971 | 28993 | 51.9 | 43.5 | 4777 | 29358 | 29339 | 52.8 | 50 | 0.9 | 388 | 76.3 | 44.3 | 38 | 54.1 |
| 1258 | 2278 | 24380 | 24399 | 55 | 55 | 4778 | 25080 | 25061 | 54.1 | 50 | 1 | 701 | 75.9 | 41.4 | 38 | 54.5 |
| 1259 | 2279 | 24380 | 24399 | 55 | 55 | 4779 | 25080 | 25062 | 53.5 | 52.6 | 1.6 | 701 | 75.9 | 41.4 | 38 | 54.3 |
| 1260 | 2280 | 3168 | 3189 | 51 | 45.5 | 4780 | 3497 | 3478 | 51.3 | 50 | 0.3 | 330 | 75.3 | 42.4 | 38 | 53.1 |
| 1261 | 2281 | 1402 | 1426 | 54.1 | 40 | 4781 | 1626 | 1602 | 56.1 | 44 | 1.9 | 225 | 76.4 | 47.6 | 38 | 54.8 |
| 1262 | 2282 | 24379 | 24398 | 55 | 55 | 4782 | 25080 | 25061 | 54.1 | 50 | 1 | 702 | 75.9 | 41.3 | 38 | 54.4 |
| 1263 | 2283 | 24379 | 24398 | 55 | 55 | 4783 | 25080 | 25062 | 53.5 | 52.6 | 1.6 | 702 | 75.9 | 41.3 | 38 | 54.3 |
| 1264 | 2284 | 16875 | 16895 | 51.6 | 47.6 | 4784 | 17062 | 17045 | 50.2 | 50 | 1.4 | 188 | 74.4 | 44.1 | 38 | 52.2 |
| 1265 | 2285 | 12726 | 12746 | 51.3 | 47.6 | 4785 | 12998 | 12979 | 50.1 | 45 | 1.2 | 273 | 75.2 | 43.2 | 38 | 52.7 |
| 1266 | 2286 | 24378 | 24397 | 55 | 55 | 4786 | 24517 | 24494 | 53.2 | 41.7 | 1.8 | 140 | 72.7 | 42.9 | 38 | 51.9 |
| 1267 | 2287 | 24378 | 24397 | 55 | 55 | 4787 | 25080 | 25061 | 54.1 | 50 | 1 | 703 | 75.9 | 41.3 | 38 | 54.4 |
| 1268 | 2288 | 28939 | 28961 | 55.2 | 47.8 | 4788 | 29306 | 29285 | 56.7 | 54.5 | 1.5 | 368 | 76.6 | 45.1 | 38 | 55.3 |
| 1269 | 2289 | 28940 | 28961 | 53.1 | 45.5 | 4789 | 29306 | 29287 | 54.6 | 55 | 1.5 | 367 | 76.5 | 45 | 38 | 54.6 |
| 1270 | 2290 | 28941 | 28961 | 51.6 | 42.9 | 4790 | 29298 | 29279 | 52.6 | 55 | 1 | 358 | 76.3 | 44.7 | 38 | 54 |
| 1271 | 2291 | 28178 | 28200 | 52 | 43.5 | 4791 | 28284 | 28265 | 52.9 | 50 | 0.9 | 107 | 74.7 | 51.4 | 38 | 53 |
| 1272 | 2292 | 28941 | 28961 | 51.6 | 42.9 | 4792 | 29358 | 29339 | 52.8 | 50 | 1.2 | 418 | 76.5 | 44.5 | 38 | 54.2 |
| 1273 | 2293 | 24378 | 24397 | 55 | 55 | 4793 | 25080 | 25062 | 53.5 | 52.6 | 1.6 | 703 | 75.9 | 41.3 | 38 | 54.2 |
| 1274 | 2294 | 28938 | 28960 | 56.1 | 47.8 | 4794 | 29306 | 29285 | 56.7 | 54.5 | 0.6 | 369 | 76.5 | 45 | 38 | 55.5 |
| 1275 | 2295 | 12234 | 12252 | 50.6 | 47.4 | 4795 | 12498 | 12480 | 50 | 47.4 | 0.5 | 265 | 74.7 | 42.3 | 38 | 52.4 |
| 1276 | 2296 | 28939 | 28960 | 54.7 | 50 | 4796 | 29306 | 29287 | 54.6 | 55 | 0.1 | 368 | 76.6 | 45.1 | 38 | 55.1 |
| 1277 | 2297 | 28140 | 28158 | 54.1 | 52.6 | 4797 | 28411 | 28393 | 52.9 | 52.6 | 1.1 | 272 | 78.8 | 52.2 | 38 | 56.2 |
| 1278 | 2298 | 28941 | 28960 | 50.9 | 45 | 4798 | 29298 | 29279 | 52.6 | 55 | 1.7 | 358 | 76.3 | 44.7 | 38 | 53.8 |
| 1279 | 2299 | 28140 | 28158 | 54.1 | 52.6 | 4799 | 28416 | 28396 | 52.4 | 47.6 | 1.7 | 277 | 78.8 | 52 | 38 | 56 |
| 1280 | 2300 | 28941 | 28960 | 50.9 | 45 | 4800 | 29358 | 29339 | 52.8 | 50 | 1.9 | 418 | 76.5 | 44.5 | 38 | 53.9 |
| 1281 | 2301 | 24179 | 24200 | 53.3 | 40.9 | 4801 | 24815 | 24791 | 54.5 | 40 | 1.2 | 637 | 75.8 | 41.3 | 38 | 54.1 |
| 1282 | 2302 | 28938 | 28956 | 50.8 | 47.4 | 4802 | 29298 | 29279 | 52.6 | 55 | 1.8 | 361 | 76.4 | 44.9 | 38 | 53.8 |
| 1283 | 2303 | 12726 | 12746 | 51.3 | 47.6 | 4803 | 12992 | 12974 | 51.2 | 52.6 | 0.1 | 267 | 75.2 | 43.4 | 38 | 53.1 |
| 1284 | 2304 | 16874 | 16893 | 52.1 | 50 | 4804 | 17062 | 17045 | 50.2 | 50 | 1.9 | 189 | 74.6 | 44.4 | 38 | 52.3 |
| 1285 | 2305 | 1352 | 1371 | 56.1 | 55 | 4805 | 1484 | 1464 | 54.3 | 47.6 | 1.8 | 133 | 74.9 | 48.9 | 38 | 53.8 |
| 1286 | 2306 | 11540 | 11561 | 53.8 | 45.5 | 4806 | 11983 | 11965 | 53 | 52.6 | 0.7 | 444 | 75.1 | 40.8 | 38 | 53.6 |
| 1287 | 2307 | 24179 | 24199 | 52.7 | 42.9 | 4807 | 24815 | 24792 | 53.4 | 41.7 | 0.7 | 637 | 75.8 | 41.3 | 38 | 53.9 |
| 1288 | 2308 | 16555 | 16572 | 50.3 | 50 | 4808 | 16777 | 16758 | 51.5 | 50 | 1.2 | 223 | 73.6 | 40.8 | 38 | 51.7 |
| 1289 | 2309 | 24178 | 24198 | 52.7 | 42.9 | 4809 | 24815 | 24791 | 54.5 | 40 | 1.8 | 638 | 75.7 | 41.2 | 38 | 53.9 |
| 1290 | 2310 | 3192 | 3213 | 51.8 | 45.5 | 4810 | 3650 | 3631 | 53.1 | 50 | 1.3 | 459 | 75.7 | 42 | 38 | 53.6 |
| 1291 | 2311 | 3192 | 3213 | 51.8 | 45.5 | 4811 | 3647 | 3628 | 50.6 | 45 | 1.2 | 456 | 75.6 | 41.9 | 38 | 53.2 |
| 1292 | 2312 | 24174 | 24195 | 52.5 | 40.9 | 4812 | 24815 | 24792 | 53.4 | 41.7 | 0.9 | 642 | 75.8 | 41.3 | 38 | 53.9 |
| 1293 | 2313 | 16553 | 16571 | 53.4 | 52.6 | 4813 | 16780 | 16760 | 51.4 | 42.9 | 2 | 228 | 73.7 | 40.8 | 38 | 52.1 |
| 1294 | 2314 | 16550 | 16568 | 54.1 | 52.6 | 4814 | 17041 | 17023 | 53.5 | 52.6 | 0.6 | 492 | 75.9 | 42.3 | 38 | 54.3 |
| 1295 | 2315 | 3192 | 3213 | 51.8 | 45.5 | 4815 | 3646 | 3625 | 52 | 40.9 | 0.2 | 455 | 75.5 | 41.8 | 38 | 53.5 |
| 1296 | 2316 | 16551 | 16568 | 51.1 | 50 | 4816 | 16777 | 16758 | 51.5 | 50 | 0.4 | 227 | 73.9 | 41.4 | 38 | 52.2 |
| 1297 | 2317 | 12373 | 12391 | 50.8 | 47.4 | 4817 | 12998 | 12979 | 50.1 | 45 | 0.7 | 626 | 76.4 | 43 | 38 | 53.6 |
| 1298 | 2318 | 28868 | 28887 | 50.7 | 45 | 4818 | 29414 | 29395 | 50.5 | 50 | 0.2 | 547 | 77 | 44.8 | 38 | 54.2 |
| 1299 | 2319 | 24028 | 24047 | 53.8 | 50 | 4819 | 24815 | 24791 | 54.5 | 40 | 0.7 | 788 | 76.3 | 42 | 38 | 54.6 |
| 1300 | 2320 | 2427 | 2445 | 52.1 | 52.6 | 4820 | 3056 | 3038 | 50.8 | 52.6 | 1.3 | 630 | 76.4 | 42.9 | 38 | 53.8 |
| 1301 | 2321 | 28867 | 28886 | 53.2 | 50 | 4821 | 29306 | 29288 | 53.5 | 52.6 | 0.3 | 440 | 76.9 | 45.2 | 38 | 54.9 |
| 1302 | 2322 | 24021 | 24044 | 52.8 | 41.7 | 4822 | 24815 | 24791 | 54.5 | 40 | 1.6 | 795 | 76.2 | 41.9 | 38 | 54.3 |
| 1303 | 2323 | 28867 | 28885 | 51.5 | 52.6 | 4823 | 29414 | 29395 | 50.5 | 50 | 0.9 | 548 | 77.1 | 44.9 | 38 | 54.2 |
| 1304 | 2324 | 12369 | 12388 | 50.6 | 45 | 4824 | 13155 | 13137 | 52.1 | 52.6 | 1.5 | 787 | 76.8 | 43.3 | 38 | 54 |
| 1305 | 2325 | 27368 | 27392 | 58.2 | 48 | 4825 | 27467 | 27443 | 59.4 | 48 | 1.2 | 100 | 71.2 | 44 | 38 | 52.4 |
| 1306 | 2326 | 27369 | 27392 | 57.2 | 50 | 4826 | 27468 | 27444 | 58.4 | 44 | 1.2 | 100 | 71.2 | 44 | 38 | 52.1 |
| 1307 | 2327 | 27369 | 27392 | 57.2 | 50 | 4827 | 27468 | 27445 | 58.1 | 45.8 | 0.8 | 100 | 71.2 | 44 | 38 | 52.1 |
| 1308 | 2328 | 23841 | 23863 | 53.7 | 47.8 | 4828 | 24022 | 24003 | 55.5 | 55 | 1.7 | 182 | 74.4 | 44.5 | 38 | 53.3 |
| 1309 | 2329 | 3192 | 3213 | 51.8 | 45.5 | 4829 | 3497 | 3478 | 51.3 | 50 | 0.5 | 306 | 75 | 42.2 | 38 | 53 |
| 1310 | 2330 | 23843 | 23863 | 50.3 | 42.9 | 4830 | 24526 | 24506 | 50.3 | 42.9 | 0 | 684 | 76.1 | 41.8 | 38 | 53.4 |
| 1311 | 2331 | 27366 | 27389 | 56.1 | 45.8 | 4831 | 27465 | 27443 | 56.4 | 47.8 | 0.3 | 100 | 71.2 | 44 | 38 | 51.8 |
| 1312 | 2332 | 27366 | 27389 | 56.1 | 45.8 | 4832 | 27465 | 27444 | 55.6 | 45.5 | 0.6 | 100 | 71.2 | 44 | 38 | 51.6 |
| 1313 | 2333 | 27366 | 27389 | 56.1 | 45.8 | 4833 | 27465 | 27445 | 55.1 | 47.6 | 1 | 100 | 71.2 | 44 | 38 | 51.5 |
| 1314 | 2334 | 16549 | 16567 | 54.9 | 52.6 | 4834 | 16779 | 16758 | 53.5 | 50 | 1.4 | 231 | 74 | 41.6 | 38 | 53 |
| 1315 | 2335 | 27369 | 27389 | 52.5 | 47.6 | 4835 | 27468 | 27448 | 53.7 | 47.6 | 1.1 | 100 | 71.2 | 44 | 38 | 50.7 |
| 1316 | 2336 | 27369 | 27389 | 52.5 | 47.6 | 4836 | 27468 | 27449 | 52.6 | 45 | 0 | 100 | 71.2 | 44 | 38 | 50.7 |
| 1317 | 2337 | 27369 | 27389 | 52.5 | 47.6 | 4837 | 27468 | 27450 | 51.9 | 47.4 | 0.7 | 100 | 71.2 | 44 | 38 | 50.5 |
| 1318 | 2338 | 28654 | 28672 | 50.6 | 52.6 | 4838 | 29412 | 29393 | 50.3 | 45 | 0.2 | 759 | 77.9 | 46.1 | 38 | 54.7 |
| 1319 | 2339 | 2429 | 2447 | 50.2 | 47.4 | 4839 | 3053 | 3034 | 50.3 | 50 | 0.1 | 625 | 76.3 | 42.6 | 39 | 53.6 |
| 1320 | 2340 | 1442 | 1461 | 51.6 | 55 | 4840 | 1697 | 1676 | 51.7 | 40.9 | 0 | 256 | 75.8 | 45.3 | 39 | 53.7 |
| 1321 | 2341 | 1442 | 1461 | 51.6 | 55 | 4841 | 1697 | 1677 | 51 | 42.9 | 0.6 | 256 | 75.8 | 45.3 | 39 | 53.5 |
| 1322 | 2342 | 1442 | 1461 | 51.6 | 55 | 4842 | 1697 | 1678 | 50.3 | 45 | 1.3 | 256 | 75.8 | 45.3 | 39 | 53.3 |
| 1323 | 2343 | 3214 | 3233 | 51.1 | 50 | 4843 | 3504 | 3485 | 50.4 | 45 | 0.7 | 291 | 74.8 | 41.9 | 39 | 52.6 |
| 1324 | 2344 | 3214 | 3233 | 51.1 | 50 | 4844 | 3503 | 3484 | 51.5 | 50 | 0.4 | 290 | 74.8 | 42.1 | 39 | 52.8 |
| 1325 | 2345 | 27374 | 27392 | 50.6 | 47.4 | 4845 | 27674 | 27653 | 52.5 | 40.9 | 1.9 | 301 | 74.1 | 40.2 | 39 | 52.2 |
| 1326 | 2346 | 9930 | 9949 | 52.2 | 50 | 4846 | 10670 | 10649 | 51.3 | 40.9 | 0.9 | 741 | 75.8 | 40.9 | 39 | 53.5 |
| 1327 | 2347 | 1442 | 1461 | 51.6 | 55 | 4847 | 2103 | 2083 | 50.6 | 42.9 | 1 | 662 | 76.7 | 43.4 | 39 | 53.9 |
| 1328 | 2348 | 8867 | 8887 | 52.3 | 47.6 | 4848 | 9375 | 9354 | 50.4 | 40.9 | 2 | 509 | 75.7 | 41.8 | 39 | 53.2 |
| 1329 | 2349 | 16367 | 16386 | 51.4 | 50 | 4849 | 16775 | 16755 | 51.1 | 42.9 | 0.3 | 409 | 75 | 40.8 | 39 | 52.9 |
| 1330 | 2350 | 18081 | 18100 | 51.7 | 50 | 4850 | 18702 | 18685 | 50.2 | 50 | 1.5 | 622 | 76.2 | 42.4 | 39 | 53.5 |
| 1331 | 2351 | 18083 | 18102 | 50.6 | 45 | 4851 | 18702 | 18685 | 50.2 | 50 | 0.4 | 620 | 76.1 | 42.3 | 39 | 53.4 |
| 1332 | 2352 | 18094 | 18113 | 51 | 50 | 4852 | 18702 | 18685 | 50.2 | 50 | 0.8 | 609 | 76.1 | 42.2 | 39 | 53.4 |
| 1333 | 2353 | 8865 | 8884 | 50.4 | 45 | 4853 | 9254 | 9236 | 50.6 | 47.4 | 0.2 | 390 | 75 | 41 | 39 | 52.7 |
| 1334 | 2354 | 16367 | 16386 | 51.4 | 50 | 4854 | 16774 | 16754 | 50.4 | 42.9 | 1 | 408 | 75 | 40.9 | 39 | 52.7 |
| 1335 | 2355 | 18008 | 18028 | 53 | 52.4 | 4855 | 18220 | 18202 | 54.8 | 52.6 | 1.9 | 213 | 74.4 | 43.2 | 39 | 53.1 |
| 1336 | 2356 | 27369 | 27389 | 52.5 | 47.6 | 4856 | 27674 | 27653 | 52.5 | 40.9 | 0.1 | 306 | 74.3 | 40.5 | 39 | 52.9 |
| 1337 | 2357 | 16367 | 16386 | 51.4 | 50 | 4857 | 16774 | 16753 | 51.1 | 40.9 | 0.3 | 408 | 75 | 40.9 | 39 | 52.9 |
| 1338 | 2358 | 1442 | 1461 | 51.6 | 55 | 4858 | 2113 | 2094 | 50.1 | 45 | 1.5 | 672 | 76.7 | 43.3 | 39 | 53.8 |
| 1339 | 2359 | 7876 | 7895 | 51.5 | 45 | 4859 | 8190 | 8172 | 50.3 | 47.4 | 1.2 | 315 | 75.1 | 42.2 | 39 | 52.7 |
| 1340 | 2360 | 18696 | 18715 | 51.7 | 50 | 4860 | 19482 | 19463 | 50.1 | 45 | 1.7 | 787 | 75.6 | 40.3 | 39 | 53 |
| 1341 | 2361 | 12370 | 12388 | 50.1 | 47.4 | 4861 | 12911 | 12892 | 50.5 | 50 | 0.4 | 542 | 76.1 | 42.4 | 39 | 53.4 |
| 1342 | 2362 | 887 | 905 | 50.1 | 47.4 | 4862 | 1493 | 1473 | 52 | 47.6 | 1.9 | 607 | 77.1 | 44.6 | 39 | 54.1 |
| 1343 | 2363 | 16367 | 16387 | 51.8 | 47.6 | 4863 | 16774 | 16751 | 53.6 | 41.7 | 1.8 | 408 | 75 | 40.9 | 39 | 53.2 |
| 1344 | 2364 | 16378 | 16397 | 50.4 | 45 | 4864 | 17111 | 17090 | 51.1 | 40.9 | 0.7 | 734 | 76.3 | 42.2 | 39 | 53.6 |
| 1345 | 2365 | 16378 | 16397 | 50.4 | 45 | 4865 | 16781 | 16761 | 51.3 | 47.6 | 0.8 | 404 | 75.1 | 41.1 | 39 | 52.8 |
| 1346 | 2366 | 1402 | 1425 | 52.8 | 41.7 | 4866 | 1501 | 1478 | 54.6 | 41.7 | 1.8 | 100 | 72 | 46 | 39 | 51.3 |
| 1347 | 2367 | 16378 | 16397 | 50.4 | 45 | 4867 | 16777 | 16758 | 51.5 | 50 | 1 | 400 | 75 | 41 | 39 | 52.7 |
| 1348 | 2368 | 16378 | 16397 | 50.4 | 45 | 4868 | 16775 | 16756 | 50.3 | 45 | 0.1 | 398 | 75 | 41 | 39 | 52.7 |
| 1349 | 2369 | 16378 | 16397 | 50.4 | 45 | 4869 | 16775 | 16755 | 51.1 | 42.9 | 0.6 | 398 | 75 | 41 | 39 | 52.7 |
| 1350 | 2370 | 16378 | 16397 | 50.4 | 45 | 4870 | 16774 | 16754 | 50.4 | 42.9 | 0 | 397 | 75 | 41.1 | 39 | 52.7 |
| 1351 | 2371 | 16378 | 16397 | 50.4 | 45 | 4871 | 16774 | 16753 | 51.1 | 40.9 | 0.7 | 397 | 75 | 41.1 | 39 | 52.8 |
| 1352 | 2372 | 16378 | 16397 | 50.4 | 45 | 4872 | 16774 | 16752 | 52.2 | 43.5 | 1.8 | 397 | 75 | 41.1 | 39 | 52.8 |
| 1353 | 2373 | 10250 | 10274 | 51.6 | 40 | 4873 | 10608 | 10589 | 51 | 50 | 0.6 | 359 | 74.6 | 40.4 | 39 | 52.6 |
| 1354 | 2374 | 16548 | 16566 | 54.9 | 52.6 | 4874 | 17112 | 17090 | 53.3 | 43.5 | 1.6 | 565 | 76.3 | 42.8 | 39 | 54.5 |
| 1355 | 2375 | 19709 | 19730 | 51.3 | 40.9 | 4875 | 19922 | 19902 | 50 | 42.9 | 1.2 | 214 | 73.8 | 41.6 | 39 | 51.8 |
| 1356 | 2376 | 3218 | 3237 | 50.5 | 45 | 4876 | 3504 | 3485 | 50.4 | 45 | 0.1 | 287 | 74.7 | 41.8 | 39 | 52.5 |
| 1357 | 2377 | 3218 | 3237 | 50.5 | 45 | 4877 | 3503 | 3484 | 51.5 | 50 | 0.9 | 286 | 74.7 | 42 | 39 | 52.6 |
| 1358 | 2378 | 19709 | 19730 | 51.3 | 40.9 | 4878 | 19920 | 19899 | 50.2 | 40.9 | 1.1 | 212 | 73.7 | 41.5 | 39 | 51.8 |
| 1359 | 2379 | 1402 | 1422 | 50.2 | 42.9 | 4879 | 1501 | 1480 | 51.9 | 40.9 | 1.7 | 100 | 72 | 46 | 39 | 50.6 |
| 1360 | 2380 | 1402 | 1422 | 50.2 | 42.9 | 4880 | 1501 | 1481 | 51.2 | 42.9 | 1.1 | 100 | 72 | 46 | 39 | 50.6 |
| 1361 | 2381 | 8867 | 8886 | 50.7 | 50 | 4881 | 9249 | 9230 | 51.5 | 45 | 0.9 | 383 | 75.2 | 41.5 | 39 | 52.9 |
| 1362 | 2382 | 19794 | 19813 | 50 | 50 | 4882 | 19928 | 19908 | 52 | 52.4 | 2 | 135 | 72.8 | 43.7 | 39 | 51.1 |
| 1363 | 2383 | 8867 | 8886 | 50.7 | 50 | 4883 | 9249 | 9231 | 50.8 | 47.4 | 0.2 | 383 | 75.2 | 41.5 | 39 | 52.9 |
| 1364 | 2384 | 9927 | 9945 | 50.8 | 52.6 | 4884 | 10183 | 10165 | 51.7 | 47.4 | 0.9 | 257 | 75.3 | 44 | 39 | 53.1 |
| 1365 | 2385 | 27366 | 27384 | 52.2 | 52.6 | 4885 | 27566 | 27546 | 50.7 | 47.6 | 1.5 | 201 | 74.7 | 44.3 | 39 | 52.6 |
| 1366 | 2386 | 9927 | 9945 | 50.8 | 52.6 | 4886 | 10183 | 10166 | 50.9 | 50 | 0.1 | 257 | 75.3 | 44 | 39 | 53.1 |
| 1367 | 2387 | 27366 | 27384 | 52.2 | 52.6 | 4887 | 27568 | 27548 | 50.2 | 42.9 | 1.9 | 203 | 74.6 | 43.8 | 39 | 52.4 |
| 1368 | 2388 | 27366 | 27384 | 52.2 | 52.6 | 4888 | 27571 | 27551 | 51.4 | 42.9 | 0.8 | 206 | 74.5 | 43.7 | 39 | 52.7 |
| 1369 | 2389 | 887 | 905 | 50.1 | 47.4 | 4889 | 1483 | 1465 | 50.5 | 47.4 | 0.4 | 597 | 77 | 44.6 | 39 | 54.1 |
| 1370 | 2390 | 27366 | 27384 | 52.2 | 52.6 | 4890 | 27579 | 27558 | 51.1 | 40.9 | 1.1 | 214 | 74.9 | 44.4 | 39 | 52.9 |
| 1371 | 2391 | 16549 | 16567 | 54.9 | 52.6 | 4891 | 16774 | 16751 | 53.6 | 41.7 | 1.3 | 226 | 74 | 41.6 | 39 | 53 |
| 1372 | 2392 | 19794 | 19813 | 50 | 50 | 4892 | 19916 | 19895 | 50.2 | 40.9 | 0.2 | 123 | 72.1 | 43.1 | 39 | 50.6 |
| 1373 | 2393 | 16551 | 16568 | 51.1 | 50 | 4893 | 17062 | 17045 | 50.2 | 50 | 0.9 | 512 | 76 | 42.4 | 39 | 53.3 |
| 1374 | 2394 | 12726 | 12746 | 51.3 | 47.6 | 4894 | 13155 | 13137 | 52.1 | 52.6 | 0.8 | 430 | 76.4 | 44 | 39 | 53.9 |
| 1375 | 2395 | 545 | 564 | 50.7 | 50 | 4895 | 1171 | 1153 | 50.4 | 47.4 | 0.3 | 627 | 78.2 | 47.2 | 39 | 54.9 |
| 1376 | 2396 | 887 | 905 | 50.1 | 47.4 | 4896 | 1483 | 1464 | 51.3 | 45 | 1.2 | 597 | 77 | 44.6 | 39 | 54.1 |
| 1377 | 2397 | 9927 | 9945 | 50.8 | 52.6 | 4897 | 10356 | 10336 | 52.4 | 47.6 | 1.6 | 430 | 75.6 | 42.1 | 39 | 53.3 |
| 1378 | 2398 | 887 | 905 | 50.1 | 47.4 | 4898 | 1481 | 1463 | 50.5 | 47.4 | 0.4 | 595 | 77 | 44.5 | 39 | 54.1 |
| 1379 | 2399 | 12726 | 12746 | 51.3 | 47.6 | 4899 | 12911 | 12891 | 51.2 | 47.6 | 0.1 | 186 | 73.5 | 41.9 | 39 | 51.9 |
| 1380 | 2400 | 19795 | 19814 | 50.4 | 45 | 4900 | 19917 | 19896 | 50.9 | 45.5 | 0.5 | 123 | 72.1 | 43.1 | 39 | 50.7 |
| 1381 | 2401 | 27361 | 27380 | 52.4 | 55 | 4901 | 27566 | 27546 | 50.7 | 47.6 | 1.7 | 206 | 75.1 | 45.1 | 39 | 52.9 |
| 1382 | 2402 | 27361 | 27380 | 52.4 | 55 | 4902 | 27569 | 27548 | 50.9 | 40.9 | 1.5 | 209 | 74.9 | 44.5 | 39 | 52.8 |
| 1383 | 2403 | 27361 | 27380 | 52.4 | 55 | 4903 | 27571 | 27551 | 51.4 | 42.9 | 1 | 211 | 75 | 44.5 | 39 | 53 |
| 1384 | 2404 | 8867 | 8886 | 50.7 | 50 | 4904 | 9256 | 9237 | 50.8 | 45 | 0.1 | 390 | 75.1 | 41.3 | 39 | 52.9 |
| 1385 | 2405 | 8373 | 8391 | 50.7 | 47.4 | 4905 | 9109 | 9087 | 50.5 | 43.5 | 0.1 | 737 | 75.4 | 40 | 39 | 53 |
| 1386 | 2406 | 19800 | 19817 | 50.4 | 50 | 4906 | 19927 | 19908 | 52.1 | 55 | 1.7 | 128 | 72.6 | 43.8 | 39 | 51 |
| 1387 | 2407 | 19800 | 19817 | 50.4 | 50 | 4907 | 19924 | 19905 | 50.1 | 50 | 0.3 | 125 | 72.2 | 43.2 | 39 | 50.7 |
| 1388 | 2408 | 16553 | 16571 | 53.4 | 52.6 | 4908 | 16774 | 16751 | 53.6 | 41.7 | 0.3 | 222 | 73.7 | 41 | 39 | 52.7 |
| 1389 | 2409 | 2427 | 2445 | 52.1 | 52.6 | 4909 | 3053 | 3034 | 50.3 | 50 | 1.8 | 627 | 76.4 | 42.7 | 39 | 53.6 |
| 1390 | 2410 | 887 | 905 | 50.1 | 47.4 | 4910 | 1479 | 1460 | 51.6 | 50 | 1.5 | 593 | 77.1 | 44.7 | 39 | 54.1 |
| 1391 | 2411 | 13177 | 13197 | 50.3 | 42.9 | 4911 | 13321 | 13301 | 50.3 | 42.9 | 0 | 145 | 73.1 | 43.4 | 39 | 51.3 |
| 1392 | 2412 | 8374 | 8395 | 52.4 | 45.5 | 4912 | 9109 | 9087 | 50.5 | 43.5 | 1.9 | 736 | 75.4 | 40.1 | 39 | 53.1 |
| 1393 | 2413 | 9926 | 9944 | 50.5 | 52.6 | 4913 | 10183 | 10165 | 51.7 | 47.4 | 1.2 | 258 | 75.2 | 43.8 | 39 | 52.9 |
| 1394 | 2414 | 16562 | 16580 | 51.9 | 52.6 | 4914 | 17056 | 17035 | 51.8 | 45.5 | 0.1 | 495 | 75.8 | 42 | 39 | 53.7 |
| 1395 | 2415 | 16562 | 16581 | 52.6 | 50 | 4915 | 17056 | 17035 | 51.8 | 45.5 | 0.8 | 495 | 75.8 | 42 | 39 | 53.7 |
| 1396 | 2416 | 9926 | 9944 | 50.5 | 52.6 | 4916 | 10183 | 10166 | 50.9 | 50 | 0.4 | 258 | 75.2 | 43.8 | 39 | 52.9 |
| 1397 | 2417 | 13177 | 13197 | 50.3 | 42.9 | 4917 | 13325 | 13305 | 50.5 | 47.6 | 0.2 | 149 | 73.3 | 43.6 | 39 | 51.5 |
| 1398 | 2418 | 10141 | 10160 | 51 | 45 | 4918 | 10356 | 10336 | 52.4 | 47.6 | 1.4 | 216 | 73.5 | 40.7 | 39 | 51.8 |
| 1399 | 2419 | 2823 | 2844 | 50.4 | 45.5 | 4919 | 3185 | 3164 | 51 | 45.5 | 0.5 | 363 | 75.6 | 42.7 | 39 | 53.1 |
| 1400 | 2420 | 19800 | 19818 | 52.1 | 52.6 | 4920 | 19916 | 19895 | 50.2 | 40.9 | 1.9 | 117 | 71.7 | 42.7 | 39 | 50.3 |
| 1401 | 2421 | 8063 | 8084 | 51.4 | 45.5 | 4921 | 8189 | 8170 | 50.6 | 50 | 0.8 | 127 | 72.3 | 43.3 | 39 | 50.9 |
| 1402 | 2422 | 985 | 1008 | 56.1 | 50 | 4922 | 1485 | 1465 | 56 | 52.4 | 0 | 501 | 76.5 | 43.7 | 39 | 55.4 |
| 1403 | 2423 | 985 | 1008 | 56.1 | 50 | 4923 | 1485 | 1466 | 55.6 | 55 | 0.5 | 501 | 76.5 | 43.7 | 39 | 55.3 |
| 1404 | 2424 | 985 | 1008 | 56.1 | 50 | 4924 | 1495 | 1474 | 55.1 | 45.5 | 1 | 511 | 76.5 | 43.6 | 39 | 55.2 |
| 1405 | 2425 | 18017 | 18036 | 54.8 | 55 | 4925 | 18231 | 18209 | 53.5 | 47.8 | 1.3 | 215 | 74.5 | 43.3 | 39 | 53.3 |
| 1406 | 2426 | 985 | 1008 | 56.1 | 50 | 4926 | 1497 | 1476 | 56.4 | 50 | 0.3 | 513 | 76.6 | 43.9 | 39 | 55.5 |
| 1407 | 2427 | 13039 | 13057 | 51.1 | 52.6 | 4927 | 13155 | 13137 | 52.1 | 52.6 | 1 | 117 | 73.4 | 47 | 39 | 51.8 |
| 1408 | 2428 | 985 | 1008 | 56.1 | 50 | 4928 | 1498 | 1478 | 54.9 | 47.6 | 1.2 | 514 | 76.5 | 43.8 | 39 | 55.1 |
| 1409 | 2429 | 988 | 1006 | 52.2 | 52.6 | 4929 | 1496 | 1478 | 50.4 | 47.4 | 1.9 | 509 | 76.5 | 43.8 | 39 | 53.8 |
| 1410 | 2430 | 988 | 1006 | 52.2 | 52.6 | 4930 | 1497 | 1480 | 50.3 | 50 | 2 | 510 | 76.6 | 43.9 | 39 | 53.8 |
| 1411 | 2431 | 19856 | 19875 | 50.2 | 45 | 4931 | 20033 | 20016 | 50.4 | 50 | 0.2 | 178 | 74.1 | 43.8 | 39 | 52 |
| 1412 | 2432 | 988 | 1006 | 52.2 | 52.6 | 4932 | 1498 | 1481 | 51 | 50 | 1.2 | 511 | 76.6 | 43.8 | 39 | 54 |
| 1413 | 2433 | 3361 | 3382 | 51.9 | 45.5 | 4933 | 3650 | 3631 | 53.1 | 50 | 1.2 | 290 | 75.7 | 44.1 | 39 | 53.6 |
| 1414 | 2434 | 8867 | 8888 | 52.7 | 45.5 | 4934 | 9365 | 9347 | 53 | 52.6 | 0.3 | 499 | 75.8 | 42.1 | 39 | 54 |
| 1415 | 2435 | 24921 | 24938 | 50.4 | 50 | 4935 | 25645 | 25626 | 50.8 | 45 | 0.4 | 725 | 75.5 | 40.4 | 39 | 53.1 |
| 1416 | 2436 | 3361 | 3382 | 51.9 | 45.5 | 4936 | 3647 | 3628 | 50.6 | 45 | 1.3 | 287 | 75.6 | 43.9 | 39 | 53.2 |
| 1417 | 2437 | 24635 | 24653 | 50.5 | 52.6 | 4937 | 25398 | 25378 | 51.1 | 42.9 | 0.6 | 764 | 75.5 | 40.3 | 39 | 53.1 |
| 1418 | 2438 | 8867 | 8888 | 52.7 | 45.5 | 4938 | 9256 | 9237 | 50.8 | 45 | 1.9 | 390 | 75.1 | 41.3 | 39 | 52.9 |
| 1419 | 2439 | 18017 | 18036 | 54.8 | 55 | 4939 | 18712 | 18693 | 54.8 | 55 | 0 | 696 | 76.4 | 42.5 | 39 | 55 |
| 1420 | 2440 | 24633 | 24651 | 50.1 | 52.6 | 4940 | 25398 | 25378 | 51.1 | 42.9 | 0.9 | 766 | 75.6 | 40.3 | 39 | 53 |
| 1421 | 2441 | 18011 | 18032 | 55.7 | 54.5 | 4941 | 18220 | 18202 | 54.8 | 52.6 | 0.9 | 210 | 74.5 | 43.3 | 39 | 53.7 |
| 1422 | 2442 | 18014 | 18032 | 51 | 52.6 | 4942 | 18223 | 18206 | 51.8 | 50 | 0.8 | 210 | 74.3 | 42.9 | 39 | 52.4 |
| 1423 | 2443 | 24630 | 24648 | 50.8 | 52.6 | 4943 | 25398 | 25378 | 51.1 | 42.9 | 0.2 | 769 | 75.6 | 40.4 | 39 | 53.3 |
| 1424 | 2444 | 18014 | 18032 | 51 | 52.6 | 4944 | 18231 | 18210 | 52.2 | 45.5 | 1.2 | 218 | 74.5 | 43.1 | 39 | 52.5 |
| 1425 | 2445 | 18014 | 18032 | 51 | 52.6 | 4945 | 18233 | 18214 | 52 | 50 | 1.1 | 220 | 74.7 | 43.6 | 39 | 52.7 |
| 1426 | 2446 | 18014 | 18032 | 51 | 52.6 | 4946 | 18233 | 18215 | 51.3 | 52.6 | 0.4 | 220 | 74.7 | 43.6 | 39 | 52.7 |
| 1427 | 2447 | 18011 | 18031 | 54.5 | 52.4 | 4947 | 18220 | 18201 | 56.1 | 55 | 1.6 | 210 | 74.5 | 43.3 | 39 | 53.6 |
| 1428 | 2448 | 3361 | 3382 | 51.9 | 45.5 | 4948 | 3646 | 3625 | 52 | 40.9 | 0.1 | 286 | 75.5 | 43.7 | 39 | 53.5 |
| 1429 | 2449 | 4658 | 4677 | 50.5 | 50 | 4949 | 5306 | 5288 | 52.4 | 52.6 | 2 | 649 | 75.5 | 40.7 | 39 | 53.1 |
| 1430 | 2450 | 18012 | 18031 | 53.2 | 55 | 4950 | 18223 | 18205 | 53.3 | 52.6 | 0.2 | 212 | 74.5 | 43.4 | 39 | 53.2 |
| 1431 | 2451 | 18012 | 18031 | 53.2 | 55 | 4951 | 18712 | 18693 | 54.8 | 55 | 1.7 | 701 | 76.4 | 42.7 | 39 | 54.6 |
| 1432 | 2452 | 13040 | 13059 | 50.9 | 50 | 4952 | 13325 | 13305 | 50.5 | 47.6 | 0.4 | 286 | 75.7 | 44.4 | 39 | 53.3 |
| 1433 | 2453 | 8867 | 8888 | 52.7 | 45.5 | 4953 | 9249 | 9231 | 50.8 | 47.4 | 1.9 | 383 | 75.2 | 41.5 | 39 | 53 |
| 1434 | 2454 | 24179 | 24198 | 51 | 45 | 4954 | 24740 | 24717 | 52.5 | 41.7 | 1.4 | 562 | 76 | 42.2 | 39 | 53.6 |
| 1435 | 2455 | 18013 | 18031 | 50.6 | 52.6 | 4955 | 18229 | 18209 | 50.1 | 42.9 | 0.5 | 217 | 74.4 | 42.9 | 39 | 52.2 |
| 1436 | 2456 | 8865 | 8884 | 50.4 | 45 | 4956 | 9340 | 9319 | 50.8 | 45.5 | 0.3 | 476 | 75.5 | 41.6 | 39 | 53.1 |
| 1437 | 2457 | 24558 | 24577 | 50.7 | 50 | 4957 | 24936 | 24919 | 51.8 | 50 | 1.1 | 379 | 75.8 | 43 | 39 | 53.3 |
| 1438 | 2458 | 8867 | 8888 | 52.7 | 45.5 | 4958 | 9249 | 9230 | 51.5 | 45 | 1.2 | 383 | 75.2 | 41.5 | 39 | 53.2 |
| 1439 | 2459 | 26039 | 26058 | 54 | 55 | 4959 | 26753 | 26733 | 54 | 52.4 | 0.1 | 715 | 76 | 41.5 | 39 | 54.5 |
| 1440 | 2460 | 26039 | 26058 | 54 | 55 | 4960 | 26753 | 26734 | 52.6 | 55 | 1.4 | 715 | 76 | 41.5 | 39 | 54.1 |
| 1441 | 2461 | 18009 | 18028 | 51.6 | 55 | 4961 | 18223 | 18206 | 51.8 | 50 | 0.1 | 215 | 74.5 | 43.3 | 39 | 52.7 |
| 1442 | 2462 | 24482 | 24503 | 51.6 | 40.9 | 4962 | 25080 | 25062 | 53.5 | 52.6 | 1.8 | 599 | 75.5 | 40.7 | 39 | 53.4 |
| 1443 | 2463 | 8861 | 8880 | 50.2 | 45 | 4963 | 9109 | 9087 | 50.5 | 43.5 | 0.4 | 249 | 73.8 | 40.6 | 39 | 51.8 |
| 1444 | 2464 | 24483 | 24503 | 51 | 42.9 | 4964 | 25086 | 25069 | 50.3 | 50 | 0.6 | 604 | 75.5 | 40.7 | 39 | 53 |
| 1445 | 2465 | 18011 | 18030 | 52.9 | 55 | 4965 | 18220 | 18202 | 54.8 | 52.6 | 2 | 210 | 74.5 | 43.3 | 39 | 53.1 |
| 1446 | 2466 | 24481 | 24502 | 51.5 | 45.5 | 4966 | 24815 | 24792 | 53.4 | 41.7 | 1.9 | 335 | 75.5 | 43 | 39 | 53.4 |
| 1447 | 2467 | 24481 | 24502 | 51.5 | 45.5 | 4967 | 25081 | 25063 | 52.4 | 52.6 | 0.9 | 601 | 75.5 | 40.8 | 39 | 53.4 |
| 1448 | 2468 | 24482 | 24502 | 50.3 | 42.9 | 4968 | 25082 | 25064 | 51.1 | 52.6 | 0.8 | 601 | 75.5 | 40.8 | 39 | 53 |
| 1449 | 2469 | 24482 | 24502 | 50.3 | 42.9 | 4969 | 25085 | 25068 | 50.3 | 50 | 0 | 604 | 75.4 | 40.6 | 39 | 53 |
| 1450 | 2470 | 24482 | 24502 | 50.3 | 42.9 | 4970 | 25086 | 25069 | 50.3 | 50 | 0 | 605 | 75.5 | 40.7 | 39 | 53 |
| 1451 | 2471 | 18011 | 18030 | 52.9 | 55 | 4971 | 18223 | 18206 | 51.8 | 50 | 1.1 | 213 | 74.4 | 43.2 | 39 | 52.7 |
| 1452 | 2472 | 18011 | 18030 | 52.9 | 55 | 4972 | 18231 | 18210 | 52.2 | 45.5 | 0.7 | 221 | 74.7 | 43.4 | 39 | 53 |
| 1453 | 2473 | 18011 | 18030 | 52.9 | 55 | 4973 | 18233 | 18214 | 52 | 50 | 0.9 | 223 | 74.9 | 43.9 | 39 | 53.1 |
| 1454 | 2474 | 18011 | 18030 | 52.9 | 55 | 4974 | 18233 | 18215 | 51.3 | 52.6 | 1.6 | 223 | 74.9 | 43.9 | 39 | 52.9 |
| 1455 | 2475 | 24419 | 24440 | 52.3 | 45.5 | 4975 | 24815 | 24792 | 53.4 | 41.7 | 1.2 | 397 | 75.9 | 43.1 | 39 | 53.9 |
| 1456 | 2476 | 18008 | 18029 | 54.5 | 50 | 4976 | 18220 | 18201 | 56.1 | 55 | 1.6 | 213 | 74.4 | 43.2 | 39 | 53.6 |
| 1457 | 2477 | 24420 | 24440 | 50.8 | 42.9 | 4977 | 24527 | 24507 | 51 | 42.9 | 0.2 | 108 | 70.7 | 41.7 | 39 | 49.9 |
| 1458 | 2478 | 12232 | 12250 | 51.9 | 52.6 | 4978 | 12994 | 12976 | 50.3 | 47.4 | 1.6 | 763 | 76.4 | 42.5 | 39 | 53.7 |
| 1459 | 2479 | 4644 | 4665 | 52.5 | 45.5 | 4979 | 5306 | 5288 | 52.4 | 52.6 | 0.1 | 663 | 75.6 | 40.9 | 39 | 53.8 |
| 1460 | 2480 | 18009 | 18029 | 53.3 | 52.4 | 4980 | 18712 | 18693 | 54.8 | 55 | 1.6 | 704 | 76.4 | 42.6 | 39 | 54.6 |
| 1461 | 2481 | 18010 | 18029 | 51.8 | 50 | 4981 | 18223 | 18205 | 53.3 | 52.6 | 1.5 | 214 | 74.4 | 43 | 39 | 52.7 |
| 1462 | 2482 | 24418 | 24439 | 52.9 | 45.5 | 4982 | 24527 | 24507 | 51 | 42.9 | 1.9 | 110 | 71.3 | 42.7 | 39 | 50.3 |
| 1463 | 2483 | 24418 | 24439 | 52.9 | 45.5 | 4983 | 24815 | 24792 | 53.4 | 41.7 | 0.5 | 398 | 75.9 | 43.2 | 39 | 54.1 |
| 1464 | 2484 | 9351 | 9370 | 51.2 | 50 | 4984 | 10017 | 9999 | 52.8 | 52.6 | 1.6 | 667 | 75.7 | 40.9 | 39 | 53.4 |
| 1465 | 2485 | 18011 | 18029 | 51.3 | 52.6 | 4985 | 18229 | 18209 | 50.1 | 42.9 | 1.2 | 219 | 74.4 | 42.9 | 39 | 52.2 |
| 1466 | 2486 | 13176 | 13196 | 51.4 | 47.6 | 4986 | 13314 | 13297 | 51 | 50 | 0.4 | 139 | 73 | 43.9 | 39 | 51.5 |
| 1467 | 2487 | 3229 | 3248 | 50.6 | 50 | 4987 | 3497 | 3478 | 51.3 | 50 | 0.6 | 269 | 74.5 | 41.6 | 39 | 52.4 |
| 1468 | 2488 | 25772 | 25793 | 52.4 | 40.9 | 4988 | 26182 | 26161 | 51.2 | 40.9 | 1.2 | 411 | 74.7 | 40.1 | 39 | 52.8 |
| 1469 | 2489 | 3229 | 3248 | 50.6 | 50 | 4989 | 3500 | 3481 | 51.2 | 50 | 0.5 | 272 | 74.5 | 41.5 | 39 | 52.4 |
| 1470 | 2490 | 13176 | 13196 | 51.4 | 47.6 | 4990 | 13323 | 13304 | 51.1 | 45 | 0.3 | 148 | 73.3 | 43.9 | 39 | 51.8 |
| 1471 | 2491 | 25771 | 25790 | 51.1 | 45 | 4991 | 26183 | 26163 | 51.7 | 42.9 | 0.6 | 413 | 74.8 | 40.4 | 39 | 52.8 |
| 1472 | 2492 | 24418 | 24436 | 50 | 47.4 | 4992 | 24526 | 24506 | 50.3 | 42.9 | 0.3 | 109 | 71.4 | 43.1 | 39 | 50.1 |
| 1473 | 2493 | 25769 | 25786 | 50.3 | 50 | 4993 | 26182 | 26161 | 51.2 | 40.9 | 0.9 | 414 | 74.8 | 40.3 | 39 | 52.6 |
| 1474 | 2494 | 18009 | 18028 | 51.6 | 55 | 4994 | 18231 | 18210 | 52.2 | 45.5 | 0.6 | 223 | 74.7 | 43.5 | 39 | 52.9 |
| 1475 | 2495 | 18009 | 18028 | 51.6 | 55 | 4995 | 18233 | 18214 | 52 | 50 | 0.4 | 225 | 74.9 | 44 | 39 | 53 |
| 1476 | 2496 | 24418 | 24436 | 50 | 47.4 | 4996 | 25082 | 25064 | 51.1 | 52.6 | 1.1 | 665 | 75.8 | 41.2 | 39 | 53.2 |
| 1477 | 2497 | 18009 | 18028 | 51.6 | 55 | 4997 | 18233 | 18215 | 51.3 | 52.6 | 0.3 | 225 | 74.9 | 44 | 39 | 53 |
| 1478 | 2498 | 24418 | 24436 | 50 | 47.4 | 4998 | 25209 | 25190 | 50.6 | 50 | 0.6 | 792 | 76.2 | 41.9 | 39 | 53.5 |
| 1479 | 2499 | 25363 | 25381 | 51.1 | 52.6 | 4999 | 25650 | 25631 | 51.3 | 45 | 0.1 | 288 | 74.2 | 40.6 | 39 | 52.4 |
| 1480 | 2500 | 25363 | 25381 | 51.1 | 52.6 | 5000 | 25651 | 25634 | 50.4 | 50 | 0.7 | 289 | 74.3 | 40.8 | 39 | 52.2 |
| 1481 | 2501 | 25354 | 25372 | 50.9 | 52.6 | 5001 | 25548 | 25531 | 51.1 | 50 | 0.2 | 195 | 74.1 | 43.1 | 39 | 52.2 |
| 1482 | 2502 | 18005 | 18024 | 51.1 | 50 | 5002 | 18223 | 18206 | 51.8 | 50 | 0.6 | 219 | 74.4 | 42.9 | 39 | 52.5 |
| 1483 | 2503 | 18005 | 18024 | 51.1 | 50 | 5003 | 18231 | 18210 | 52.2 | 45.5 | 1.1 | 227 | 74.6 | 43.2 | 39 | 52.7 |
| 1484 | 2504 | 25354 | 25372 | 50.9 | 52.6 | 5004 | 25651 | 25632 | 52.7 | 50 | 1.8 | 298 | 74.6 | 41.3 | 39 | 52.6 |
| 1485 | 2505 | 18005 | 18024 | 51.1 | 50 | 5005 | 18233 | 18215 | 51.3 | 52.6 | 0.2 | 229 | 74.9 | 43.7 | 39 | 52.8 |
| 1486 | 2506 | 18003 | 18023 | 53.5 | 52.4 | 5006 | 18712 | 18693 | 54.8 | 55 | 1.3 | 710 | 76.4 | 42.7 | 39 | 54.7 |
| 1487 | 2507 | 13176 | 13196 | 51.4 | 47.6 | 5007 | 13326 | 13306 | 50.7 | 42.9 | 0.7 | 151 | 73.4 | 43.7 | 39 | 51.7 |
| 1488 | 2508 | 8868 | 8889 | 50.4 | 40.9 | 5008 | 9311 | 9292 | 50.7 | 50 | 0.3 | 444 | 75.4 | 41.4 | 39 | 53 |
| 1489 | 2509 | 25354 | 25372 | 50.9 | 52.6 | 5009 | 25832 | 25811 | 52.1 | 50 | 1.2 | 479 | 75 | 40.3 | 39 | 52.9 |
| 1490 | 2510 | 8375 | 8396 | 51.8 | 45.5 | 5010 | 9109 | 9087 | 50.5 | 43.5 | 1.2 | 735 | 75.4 | 40 | 39 | 53 |
| 1491 | 2511 | 9918 | 9938 | 51.4 | 47.6 | 5011 | 10017 | 9999 | 52.8 | 52.6 | 1.3 | 100 | 72.4 | 47 | 39 | 51.2 |
| 1492 | 2512 | 8375 | 8396 | 51.8 | 45.5 | 5012 | 8933 | 8916 | 52.2 | 50 | 0.4 | 559 | 75.1 | 40.1 | 39 | 53.2 |
| 1493 | 2513 | 17840 | 17859 | 50.8 | 45 | 5013 | 18632 | 18611 | 50.2 | 40.9 | 0.6 | 793 | 76.1 | 41.5 | 39 | 53.4 |
| 1494 | 2514 | 13040 | 13059 | 50.9 | 50 | 5014 | 13155 | 13138 | 50.4 | 50 | 0.5 | 116 | 73.2 | 46.6 | 39 | 51.4 |
| 1495 | 2515 | 25348 | 25366 | 51.2 | 47.4 | 5015 | 25650 | 25631 | 51.3 | 45 | 0.1 | 303 | 74.6 | 41.3 | 39 | 52.7 |
| 1496 | 2516 | 25348 | 25366 | 51.2 | 47.4 | 5016 | 25651 | 25634 | 50.4 | 50 | 0.7 | 304 | 74.7 | 41.4 | 39 | 52.5 |
| 1497 | 2517 | 13040 | 13059 | 50.9 | 50 | 5017 | 13178 | 13157 | 50.4 | 40.9 | 0.5 | 139 | 73.6 | 45.3 | 39 | 51.7 |
| 1498 | 2518 | 17792 | 17813 | 51.6 | 40.9 | 5018 | 18223 | 18205 | 53.3 | 52.6 | 1.7 | 432 | 74.9 | 40.3 | 39 | 53 |
| 1499 | 2519 | 25348 | 25366 | 51.2 | 47.4 | 5019 | 25832 | 25811 | 52.1 | 50 | 0.9 | 485 | 75.1 | 40.4 | 39 | 53 |
| 1500 | 2520 | 25348 | 25366 | 51.2 | 47.4 | 5020 | 25833 | 25812 | 51.4 | 45.5 | 0.2 | 486 | 75 | 40.3 | 39 | 53 |
| 1501 | 2521 | 25347 | 25365 | 52 | 52.6 | 5021 | 25651 | 25632 | 52.7 | 50 | 0.7 | 305 | 74.8 | 41.6 | 39 | 53 |
| 1502 | 2522 | 8868 | 8889 | 50.4 | 40.9 | 5022 | 9252 | 9234 | 51.4 | 52.6 | 1 | 385 | 75.1 | 41.3 | 39 | 52.8 |
| 1503 | 2523 | 17793 | 17813 | 50 | 42.9 | 5023 | 18229 | 18209 | 50.1 | 42.9 | 0.1 | 437 | 74.9 | 40.3 | 39 | 52.5 |
| 1504 | 2524 | 17793 | 17813 | 50 | 42.9 | 5024 | 18231 | 18211 | 50.6 | 47.6 | 0.6 | 439 | 75 | 40.5 | 39 | 52.6 |
| 1505 | 2525 | 17793 | 17813 | 50 | 42.9 | 5025 | 18234 | 18216 | 51 | 52.6 | 1 | 442 | 75.1 | 40.7 | 39 | 52.7 |
| 1506 | 2526 | 17793 | 17813 | 50 | 42.9 | 5026 | 18238 | 18219 | 50.3 | 45 | 0.2 | 446 | 75.1 | 40.8 | 39 | 52.7 |
| 1507 | 2527 | 17793 | 17813 | 50 | 42.9 | 5027 | 18239 | 18220 | 50 | 45 | 0 | 447 | 75.1 | 40.7 | 39 | 52.7 |
| 1508 | 2528 | 24180 | 24199 | 50.3 | 40 | 5028 | 24938 | 24921 | 50.4 | 50 | 0.1 | 759 | 75.8 | 40.8 | 39 | 53.2 |
| 1509 | 2529 | 25348 | 25365 | 50.4 | 50 | 5029 | 25832 | 25811 | 52.1 | 50 | 1.7 | 485 | 75.1 | 40.4 | 39 | 52.8 |
| 1510 | 2530 | 25068 | 25085 | 50.3 | 50 | 5030 | 25182 | 25164 | 51.4 | 47.4 | 1.1 | 115 | 73.3 | 47 | 39 | 51.5 |
| 1511 | 2531 | 29260 | 29278 | 51.3 | 47.4 | 5031 | 29414 | 29395 | 50.5 | 50 | 0.8 | 155 | 74.3 | 45.8 | 39 | 52.3 |
| 1512 | 2532 | 24179 | 24198 | 51 | 45 | 5032 | 24933 | 24913 | 51.1 | 42.9 | 0.1 | 755 | 75.8 | 40.9 | 39 | 53.5 |
| 1513 | 2533 | 17790 | 17811 | 51.6 | 40.9 | 5033 | 18223 | 18205 | 53.3 | 52.6 | 1.7 | 434 | 74.9 | 40.3 | 39 | 53 |
| 1514 | 2534 | 8063 | 8084 | 51.4 | 45.5 | 5034 | 8190 | 8172 | 50.3 | 47.4 | 1.1 | 128 | 72.2 | 43 | 39 | 50.8 |
| 1515 | 2535 | 24178 | 24197 | 50.3 | 40 | 5035 | 24936 | 24919 | 51.8 | 50 | 1.5 | 759 | 75.8 | 41 | 39 | 53.2 |
| 1516 | 2536 | 17791 | 17811 | 50 | 42.9 | 5036 | 18229 | 18209 | 50.1 | 42.9 | 0.1 | 439 | 74.9 | 40.3 | 39 | 52.5 |
| 1517 | 2537 | 17791 | 17811 | 50 | 42.9 | 5037 | 18231 | 18211 | 50.6 | 47.6 | 0.6 | 441 | 75 | 40.6 | 39 | 52.6 |
| 1518 | 2538 | 24174 | 24194 | 50.9 | 42.9 | 5038 | 24740 | 24717 | 52.5 | 41.7 | 1.5 | 567 | 76 | 42.2 | 39 | 53.6 |
| 1519 | 2539 | 24174 | 24194 | 50.9 | 42.9 | 5039 | 24933 | 24913 | 51.1 | 42.9 | 0.2 | 760 | 75.8 | 40.9 | 39 | 53.4 |
| 1520 | 2540 | 17791 | 17811 | 50 | 42.9 | 5040 | 18234 | 18216 | 51 | 52.6 | 1 | 444 | 75.1 | 40.8 | 39 | 52.7 |
| 1521 | 2541 | 17791 | 17811 | 50 | 42.9 | 5041 | 18238 | 18219 | 50.3 | 45 | 0.2 | 448 | 75.1 | 40.8 | 39 | 52.7 |
| 1522 | 2542 | 17791 | 17811 | 50 | 42.9 | 5042 | 18239 | 18220 | 50 | 45 | 0 | 449 | 75.1 | 40.8 | 39 | 52.7 |
| 1523 | 2543 | 24035 | 24053 | 52.2 | 52.6 | 5043 | 24526 | 24506 | 50.3 | 42.9 | 1.9 | 492 | 75.4 | 41.3 | 39 | 53 |
| 1524 | 2544 | 24035 | 24053 | 52.2 | 52.6 | 5044 | 24527 | 24507 | 51 | 42.9 | 1.2 | 493 | 75.4 | 41.2 | 39 | 53.2 |
| 1525 | 2545 | 17607 | 17628 | 52.3 | 40.9 | 5045 | 18231 | 18209 | 53.5 | 47.8 | 1.2 | 625 | 75.2 | 40 | 39 | 53.4 |
| 1526 | 2546 | 29196 | 29216 | 52.5 | 47.6 | 5046 | 29358 | 29339 | 52.8 | 50 | 0.3 | 163 | 74.9 | 46.6 | 39 | 53.3 |
| 1527 | 2547 | 17608 | 17628 | 50.9 | 42.9 | 5047 | 18231 | 18211 | 50.6 | 47.6 | 0.4 | 624 | 75.2 | 40.1 | 39 | 52.9 |
| 1528 | 2548 | 8868 | 8889 | 50.4 | 40.9 | 5048 | 9248 | 9229 | 50.1 | 45 | 0.3 | 381 | 75 | 41.2 | 39 | 52.7 |
| 1529 | 2549 | 17608 | 17628 | 50.9 | 42.9 | 5049 | 18234 | 18216 | 51 | 52.6 | 0 | 627 | 75.3 | 40.2 | 39 | 53.1 |
| 1530 | 2550 | 29196 | 29215 | 51.8 | 50 | 5050 | 29358 | 29339 | 52.8 | 50 | 1 | 163 | 74.9 | 46.6 | 39 | 53.1 |
| 1531 | 2551 | 24023 | 24044 | 51.4 | 40.9 | 5051 | 24527 | 24508 | 50.5 | 45 | 0.9 | 505 | 75.4 | 41 | 39 | 53 |
| 1532 | 2552 | 9409 | 9428 | 51.6 | 45 | 5052 | 9989 | 9968 | 51 | 40.9 | 0.6 | 581 | 75.3 | 40.4 | 39 | 53.1 |
| 1533 | 2553 | 29196 | 29214 | 51.1 | 52.6 | 5053 | 29358 | 29339 | 52.8 | 50 | 1.7 | 163 | 74.9 | 46.6 | 39 | 52.8 |
| 1534 | 2554 | 8861 | 8880 | 50.2 | 45 | 5054 | 9257 | 9238 | 50.5 | 45 | 0.3 | 397 | 74.9 | 40.8 | 39 | 52.6 |
| 1535 | 2555 | 17607 | 17627 | 51.6 | 42.9 | 5055 | 18231 | 18209 | 53.5 | 47.8 | 1.9 | 625 | 75.2 | 40 | 39 | 53.2 |
| 1536 | 2556 | 29195 | 29213 | 51.9 | 52.6 | 5056 | 29358 | 29339 | 52.8 | 50 | 0.9 | 164 | 74.8 | 46.3 | 39 | 53 |
| 1537 | 2557 | 17608 | 17627 | 50.2 | 45 | 5057 | 18231 | 18211 | 50.6 | 47.6 | 0.4 | 624 | 75.2 | 40.1 | 39 | 52.8 |
| 1538 | 2558 | 985 | 1004 | 51.1 | 50 | 5058 | 1622 | 1602 | 51.6 | 47.6 | 0.5 | 638 | 77.2 | 44.7 | 39 | 54.4 |
| 1539 | 2559 | 17608 | 17627 | 50.2 | 45 | 5059 | 18234 | 18216 | 51 | 52.6 | 0.8 | 627 | 75.3 | 40.2 | 39 | 52.9 |
| 1540 | 2560 | 23841 | 23860 | 52.1 | 55 | 5060 | 24496 | 24478 | 50.7 | 52.6 | 1.4 | 656 | 76.1 | 42.1 | 39 | 53.6 |
| 1541 | 2561 | 23841 | 23860 | 52.1 | 55 | 5061 | 24498 | 24479 | 51.2 | 50 | 0.9 | 658 | 76.1 | 42.1 | 39 | 53.8 |
| 1542 | 2562 | 3404 | 3422 | 50.5 | 47.4 | 5062 | 3647 | 3628 | 50.6 | 45 | 0.1 | 244 | 74.6 | 42.6 | 39 | 52.5 |
| 1543 | 2563 | 9349 | 9367 | 51.7 | 52.6 | 5063 | 10017 | 9999 | 52.8 | 52.6 | 1.1 | 669 | 75.7 | 41 | 39 | 53.6 |
| 1544 | 2564 | 23841 | 23859 | 50.5 | 52.6 | 5064 | 24496 | 24478 | 50.7 | 52.6 | 0.2 | 656 | 76.1 | 42.1 | 39 | 53.5 |
| 1545 | 2565 | 25068 | 25085 | 50.3 | 50 | 5065 | 25548 | 25531 | 51.1 | 50 | 0.8 | 481 | 75.8 | 42.2 | 39 | 53.3 |
| 1546 | 2566 | 29186 | 29205 | 50.1 | 40 | 5066 | 29414 | 29395 | 50.5 | 50 | 0.4 | 229 | 75.4 | 45 | 39 | 52.9 |
| 1547 | 2567 | 29182 | 29204 | 53.2 | 43.5 | 5067 | 29358 | 29339 | 52.8 | 50 | 0.4 | 177 | 74.6 | 45.2 | 39 | 53.2 |
| 1548 | 2568 | 23841 | 23859 | 50.5 | 52.6 | 5068 | 24498 | 24479 | 51.2 | 50 | 0.7 | 658 | 76.1 | 42.1 | 39 | 53.5 |
| 1549 | 2569 | 3404 | 3422 | 50.5 | 47.4 | 5069 | 3646 | 3625 | 52 | 40.9 | 1.5 | 243 | 74.5 | 42.4 | 39 | 52.4 |
| 1550 | 2570 | 29183 | 29204 | 50.4 | 40.9 | 5070 | 29414 | 29395 | 50.5 | 50 | 0.2 | 232 | 75.4 | 44.8 | 39 | 53 |
| 1551 | 2571 | 23841 | 23859 | 50.5 | 52.6 | 5071 | 24527 | 24508 | 50.5 | 45 | 0 | 687 | 76.1 | 41.9 | 39 | 53.5 |
| 1552 | 2572 | 23838 | 23857 | 50.4 | 50 | 5072 | 24093 | 24075 | 50.9 | 52.6 | 0.5 | 256 | 75.8 | 45.3 | 39 | 53.3 |
| 1553 | 2573 | 23838 | 23857 | 50.4 | 50 | 5073 | 24496 | 24478 | 50.7 | 52.6 | 0.3 | 659 | 76.1 | 41.9 | 39 | 53.4 |
| 1554 | 2574 | 23838 | 23857 | 50.4 | 50 | 5074 | 24498 | 24479 | 51.2 | 50 | 0.8 | 661 | 76.1 | 41.9 | 39 | 53.5 |
| 1555 | 2575 | 29181 | 29201 | 52.4 | 47.6 | 5075 | 29358 | 29339 | 52.8 | 50 | 0.4 | 178 | 74.8 | 45.5 | 39 | 53.2 |
| 1556 | 2576 | 29181 | 29201 | 52.4 | 47.6 | 5076 | 29414 | 29395 | 50.5 | 50 | 1.9 | 234 | 75.6 | 45.3 | 39 | 53.2 |
| 1557 | 2577 | 29180 | 29200 | 51.7 | 42.9 | 5077 | 29358 | 29339 | 52.8 | 50 | 1.2 | 179 | 74.7 | 45.3 | 39 | 52.9 |
| 1558 | 2578 | 985 | 1004 | 51.1 | 50 | 5078 | 1498 | 1481 | 51 | 50 | 0.1 | 514 | 76.5 | 43.8 | 39 | 54 |
| 1559 | 2579 | 985 | 1004 | 51.1 | 50 | 5079 | 1497 | 1480 | 50.3 | 50 | 0.8 | 513 | 76.6 | 43.9 | 39 | 53.8 |
| 1560 | 2580 | 8859 | 8879 | 50 | 42.9 | 5080 | 9254 | 9236 | 50.6 | 47.4 | 0.6 | 396 | 75 | 40.9 | 39 | 52.6 |
| 1561 | 2581 | 29178 | 29198 | 51.4 | 42.9 | 5081 | 29414 | 29395 | 50.5 | 50 | 0.9 | 237 | 75.6 | 45.1 | 39 | 53.2 |
| 1562 | 2582 | 8859 | 8879 | 50 | 42.9 | 5082 | 9340 | 9319 | 50.8 | 45.5 | 0.7 | 482 | 75.5 | 41.5 | 39 | 53 |
| 1563 | 2583 | 16909 | 16928 | 50.8 | 45 | 5083 | 17109 | 17089 | 50.4 | 42.9 | 0.4 | 201 | 74.9 | 44.8 | 39 | 52.7 |
| 1564 | 2584 | 8794 | 8813 | 51.6 | 45 | 5084 | 8919 | 8901 | 50.4 | 47.4 | 1.2 | 126 | 71.8 | 42.1 | 39 | 50.5 |
| 1565 | 2585 | 8794 | 8813 | 51.6 | 45 | 5085 | 8920 | 8902 | 52.8 | 52.6 | 1.2 | 127 | 72 | 42.5 | 39 | 51 |
| 1566 | 2586 | 985 | 1004 | 51.1 | 50 | 5086 | 1496 | 1478 | 50.4 | 47.4 | 0.7 | 512 | 76.5 | 43.8 | 39 | 53.8 |
| 1567 | 2587 | 18017 | 18036 | 54.8 | 55 | 5087 | 18223 | 18205 | 53.3 | 52.6 | 1.5 | 207 | 74.3 | 43 | 39 | 53.1 |
| 1568 | 2588 | 4593 | 4613 | 51.5 | 47.6 | 5088 | 4994 | 4974 | 51.2 | 47.6 | 0.3 | 402 | 76.1 | 43.5 | 39 | 53.7 |
| 1569 | 2589 | 18017 | 18036 | 54.8 | 55 | 5089 | 18220 | 18201 | 56.1 | 55 | 1.3 | 204 | 74.3 | 43.1 | 39 | 53.5 |
| 1570 | 2590 | 6155 | 6174 | 52.1 | 50 | 5090 | 6486 | 6467 | 50.8 | 45 | 1.2 | 332 | 74.5 | 40.7 | 39 | 52.5 |
| 1571 | 2591 | 6158 | 6178 | 51.3 | 42.9 | 5091 | 6486 | 6467 | 50.8 | 45 | 0.4 | 329 | 74.3 | 40.1 | 39 | 52.4 |
| 1572 | 2592 | 3232 | 3251 | 50.3 | 50 | 5092 | 3500 | 3481 | 51.2 | 50 | 0.8 | 269 | 74.5 | 41.6 | 39 | 52.3 |
| 1573 | 2593 | 3232 | 3251 | 50.3 | 50 | 5093 | 3497 | 3478 | 51.3 | 50 | 1 | 266 | 74.5 | 41.7 | 39 | 52.3 |
| 1574 | 2594 | 28523 | 28544 | 51.6 | 40.9 | 5094 | 29298 | 29279 | 52.6 | 55 | 1 | 776 | 78.4 | 47.3 | 39 | 52.3 |
| 1575 | 2595 | 28965 | 28984 | 52.9 | 55 | 5095 | 29358 | 29339 | 52.8 | 50 | 0.1 | 394 | 76.6 | 44.9 | 39 | 54.6 |
| 1576 | 2596 | 8866 | 8885 | 51.1 | 45 | 5096 | 9256 | 9237 | 50.8 | 45 | 0.3 | 391 | 75.1 | 41.2 | 39 | 52.9 |
| 1577 | 2597 | 28518 | 28538 | 51.2 | 42.9 | 5097 | 28672 | 28654 | 50.6 | 52.6 | 0.7 | 155 | 76.7 | 51.6 | 39 | 54 |
| 1578 | 2598 | 6165 | 6183 | 51.2 | 52.6 | 5098 | 6486 | 6467 | 50.8 | 45 | 0.3 | 322 | 74.5 | 40.7 | 39 | 52.5 |
| 1579 | 2599 | 6264 | 6283 | 50.4 | 50 | 5099 | 6483 | 6463 | 50.2 | 42.9 | 0.2 | 220 | 73.8 | 41.4 | 39 | 51.8 |
| 1580 | 2600 | 18074 | 18093 | 50.3 | 45 | 5100 | 18233 | 18215 | 51.3 | 52.6 | 1 | 160 | 73.9 | 44.4 | 39 | 51.9 |
| 1581 | 2601 | 6271 | 6291 | 51.1 | 47.6 | 5101 | 6483 | 6463 | 50.2 | 42.9 | 0.9 | 213 | 73.5 | 40.8 | 39 | 51.6 |
| 1582 | 2602 | 18074 | 18093 | 50.3 | 45 | 5102 | 18231 | 18210 | 52.2 | 45.5 | 1.9 | 158 | 73.5 | 43.7 | 39 | 51.7 |
| 1583 | 2603 | 6274 | 6293 | 50.1 | 45 | 5103 | 6483 | 6463 | 50.2 | 42.9 | 0.1 | 210 | 73.5 | 41 | 39 | 51.6 |
| 1584 | 2604 | 18074 | 18093 | 50.3 | 45 | 5104 | 18223 | 18206 | 51.8 | 50 | 1.5 | 150 | 73.2 | 43.3 | 39 | 51.4 |
| 1585 | 2605 | 5 | 23 | 51.3 | 52.6 | 5105 | 314 | 296 | 50.6 | 47.4 | 0.6 | 310 | 76.8 | 46.5 | 39 | 54 |
| 1586 | 2606 | 6343 | 6364 | 50.7 | 45.5 | 5106 | 6486 | 6467 | 50.8 | 45 | 0.1 | 144 | 71.7 | 40.3 | 39 | 50.5 |
| 1587 | 2607 | 3800 | 3820 | 50.6 | 42.9 | 5107 | 4445 | 4425 | 50.6 | 42.9 | 0 | 646 | 75.4 | 40.2 | 39 | 53 |
| 1588 | 2608 | 7615 | 7635 | 51.1 | 47.6 | 5108 | 7821 | 7798 | 52.8 | 41.7 | 1.6 | 207 | 73.7 | 41.5 | 39 | 52 |
| 1589 | 2609 | 7723 | 7741 | 52.2 | 52.6 | 5109 | 8049 | 8032 | 50.4 | 50 | 1.8 | 327 | 74.9 | 41.6 | 39 | 52.6 |
| 1590 | 2610 | 1 | 19 | 50.1 | 52.6 | 5110 | 314 | 296 | 50.6 | 47.4 | 0.6 | 314 | 76.8 | 46.5 | 39 | 53.9 |
| 1591 | 2611 | 7725 | 7742 | 50 | 50 | 5111 | 7856 | 7836 | 51.1 | 42.9 | 1.1 | 132 | 71.3 | 40.2 | 39 | 50 |
| 1592 | 2612 | 18074 | 18094 | 51.1 | 42.9 | 5112 | 18233 | 18215 | 51.3 | 52.6 | 0.3 | 160 | 73.9 | 44.4 | 39 | 52.1 |
| 1593 | 2613 | 3168 | 3189 | 51 | 45.5 | 5113 | 3503 | 3484 | 51.5 | 50 | 0.5 | 336 | 75.3 | 42.6 | 39 | 53.1 |
| 1594 | 2614 | 18074 | 18094 | 51.1 | 42.9 | 5114 | 18231 | 18210 | 52.2 | 45.5 | 1.1 | 158 | 73.5 | 43.7 | 39 | 51.9 |
| 1595 | 2615 | 13177 | 13197 | 50.3 | 42.9 | 5115 | 13312 | 13294 | 51 | 52.6 | 0.7 | 136 | 72.7 | 43.4 | 39 | 51.1 |
| 1596 | 2616 | 28190 | 28209 | 54.2 | 55 | 5116 | 28671 | 28652 | 52.8 | 55 | 1.5 | 482 | 79.9 | 52.1 | 39 | 56.8 |
| 1597 | 2617 | 28190 | 28209 | 54.2 | 55 | 5117 | 28673 | 28654 | 53.5 | 55 | 0.7 | 484 | 79.9 | 52.3 | 39 | 57.1 |
| 1598 | 2618 | 28190 | 28208 | 51.7 | 52.6 | 5118 | 28671 | 28652 | 52.8 | 55 | 1 | 482 | 79.9 | 52.1 | 39 | 56.5 |
| 1599 | 2619 | 28190 | 28208 | 51.7 | 52.6 | 5119 | 28671 | 28653 | 50.2 | 52.6 | 1.5 | 482 | 79.9 | 52.1 | 39 | 56.1 |
| 1600 | 2620 | 18074 | 18094 | 51.1 | 42.9 | 5120 | 18223 | 18206 | 51.8 | 50 | 0.7 | 150 | 73.2 | 43.3 | 39 | 51.6 |
| 1601 | 2621 | 28185 | 28205 | 53.5 | 47.6 | 5121 | 28284 | 28265 | 52.9 | 50 | 0.6 | 100 | 74.5 | 52 | 39 | 53.1 |
| 1602 | 2622 | 28187 | 28205 | 53.1 | 52.6 | 5122 | 28672 | 28653 | 51.8 | 55 | 1.2 | 486 | 79.9 | 52.3 | 39 | 56.6 |
| 1603 | 2623 | 2371 | 2389 | 50.3 | 47.4 | 5123 | 2900 | 2881 | 50.1 | 45 | 0.2 | 530 | 76.8 | 44.3 | 39 | 53.9 |
| 1604 | 2624 | 2371 | 2389 | 50.3 | 47.4 | 5124 | 3052 | 3033 | 50.3 | 50 | 0.1 | 682 | 76.7 | 43.4 | 39 | 53.9 |
| 1605 | 2625 | 2371 | 2389 | 50.3 | 47.4 | 5125 | 3056 | 3038 | 50.8 | 52.6 | 0.5 | 686 | 76.7 | 43.4 | 39 | 53.9 |
| 1606 | 2626 | 18074 | 18095 | 52.2 | 45.5 | 5126 | 18223 | 18205 | 53.3 | 52.6 | 1.1 | 150 | 73.2 | 43.3 | 39 | 52 |
| 1607 | 2627 | 2220 | 2239 | 51.3 | 45 | 5127 | 2891 | 2873 | 50.8 | 47.4 | 0.5 | 672 | 76.8 | 43.8 | 39 | 54.1 |
| 1608 | 2628 | 18077 | 18097 | 51.5 | 47.6 | 5128 | 18662 | 18641 | 50.4 | 40.9 | 1.1 | 586 | 76.2 | 42.7 | 39 | 53.6 |
| 1609 | 2629 | 28117 | 28135 | 50.6 | 52.6 | 5129 | 28671 | 28653 | 50.2 | 52.6 | 0.4 | 555 | 80 | 51.9 | 39 | 56.1 |
| 1610 | 2630 | 28116 | 28134 | 50.8 | 47.4 | 5130 | 28671 | 28653 | 50.2 | 52.6 | 0.6 | 556 | 79.9 | 51.8 | 39 | 56.1 |
| 1611 | 2631 | 12232 | 12250 | 51.9 | 52.6 | 5131 | 13000 | 12981 | 51.1 | 45 | 0.8 | 769 | 76.5 | 42.5 | 39 | 54 |
| 1612 | 2632 | 18080 | 18098 | 51.2 | 52.6 | 5132 | 18702 | 18685 | 50.2 | 50 | 1 | 623 | 76.2 | 42.4 | 39 | 53.5 |
| 1613 | 2633 | 12232 | 12250 | 51.9 | 52.6 | 5133 | 12999 | 12980 | 50.6 | 40 | 1.4 | 768 | 76.4 | 42.4 | 39 | 53.8 |
| 1614 | 2634 | 28820 | 28840 | 54.8 | 47.6 | 5134 | 29306 | 29285 | 56.7 | 54.5 | 1.9 | 487 | 77.1 | 45.4 | 39 | 55.5 |
| 1615 | 2635 | 28820 | 28840 | 54.8 | 47.6 | 5135 | 29306 | 29287 | 54.6 | 55 | 0.3 | 487 | 77.1 | 45.4 | 39 | 55.5 |
| 1616 | 2636 | 18080 | 18098 | 51.2 | 52.6 | 5136 | 18642 | 18622 | 50.5 | 42.9 | 0.7 | 563 | 76.2 | 42.6 | 39 | 53.6 |
| 1617 | 2637 | 8865 | 8884 | 50.4 | 45 | 5137 | 9249 | 9231 | 50.8 | 47.4 | 0.4 | 385 | 75.1 | 41.3 | 39 | 52.8 |
| 1618 | 2638 | 8865 | 8884 | 50.4 | 45 | 5138 | 9249 | 9230 | 51.5 | 45 | 1.1 | 385 | 75.1 | 41.3 | 39 | 52.8 |
| 1619 | 2639 | 8865 | 8884 | 50.4 | 45 | 5139 | 9109 | 9087 | 50.5 | 43.5 | 0.1 | 245 | 73.9 | 40.8 | 39 | 51.9 |
| 1620 | 2640 | 28819 | 28839 | 56.6 | 52.4 | 5140 | 29306 | 29285 | 56.7 | 54.5 | 0.2 | 488 | 77.2 | 45.5 | 39 | 56.1 |
| 1621 | 2641 | 9130 | 9151 | 52 | 40.9 | 5141 | 9364 | 9346 | 53.9 | 52.6 | 2 | 235 | 74.8 | 43.4 | 39 | 53.1 |
| 1622 | 2642 | 28820 | 28839 | 54.3 | 50 | 5142 | 29306 | 29287 | 54.6 | 55 | 0.3 | 487 | 77.1 | 45.4 | 39 | 55.4 |
| 1623 | 2643 | 8865 | 8884 | 50.4 | 45 | 5143 | 9248 | 9229 | 50.1 | 45 | 0.3 | 384 | 75 | 41.1 | 39 | 52.7 |
| 1624 | 2644 | 18080 | 18098 | 51.2 | 52.6 | 5144 | 18229 | 18209 | 50.1 | 42.9 | 1.1 | 150 | 73.2 | 43.3 | 39 | 51.4 |
| 1625 | 2645 | 15752 | 15772 | 50.8 | 47.6 | 5145 | 16175 | 16155 | 51.8 | 47.6 | 1 | 424 | 75.1 | 41 | 39 | 52.9 |
| 1626 | 2646 | 12232 | 12250 | 51.9 | 52.6 | 5146 | 12498 | 12480 | 50 | 47.4 | 1.9 | 267 | 74.7 | 42.3 | 39 | 52.4 |
| 1627 | 2647 | 18078 | 18098 | 51.5 | 47.6 | 5147 | 18223 | 18205 | 53.3 | 52.6 | 1.8 | 146 | 73 | 43.2 | 39 | 51.6 |
| 1628 | 2648 | 7833 | 7853 | 50.7 | 47.6 | 5148 | 8054 | 8035 | 50.4 | 50 | 0.2 | 222 | 74.6 | 43.2 | 39 | 52.4 |
| 1629 | 2649 | 230 | 248 | 51.2 | 52.6 | 5149 | 713 | 695 | 50.7 | 47.4 | 0.5 | 484 | 79.3 | 50.6 | 39 | 55.8 |
| 1630 | 2650 | 1472 | 1491 | 51.2 | 45 | 5150 | 2153 | 2134 | 50.4 | 45 | 0.8 | 682 | 76.5 | 42.8 | 39 | 53.7 |
| 1631 | 2651 | 18076 | 18098 | 54.4 | 47.8 | 5151 | 18220 | 18201 | 56.1 | 55 | 1.8 | 145 | 73.1 | 43.4 | 39 | 52.6 |
| 1632 | 2652 | 1442 | 1461 | 51.6 | 55 | 5152 | 1694 | 1673 | 51.7 | 40.9 | 0.1 | 253 | 75.9 | 45.5 | 39 | 53.7 |
| 1633 | 2653 | 28618 | 28636 | 52.5 | 52.6 | 5153 | 29358 | 29339 | 52.8 | 50 | 0.3 | 741 | 78.2 | 47 | 39 | 55.6 |
| 1634 | 2654 | 940 | 959 | 56.3 | 55 | 5154 | 1701 | 1677 | 54.7 | 40 | 1.6 | 762 | 77.1 | 44.2 | 40 | 55.5 |
| 1635 | 2655 | 18076 | 18097 | 53.1 | 45.5 | 5155 | 18696 | 18672 | 53.9 | 40 | 0.8 | 621 | 76.2 | 42.4 | 40 | 54.4 |
| 1636 | 2656 | 940 | 959 | 56.3 | 55 | 5156 | 1697 | 1673 | 54.4 | 40 | 1.9 | 758 | 77.2 | 44.3 | 40 | 55.5 |
| 1637 | 2657 | 3016 | 3036 | 50.2 | 42.9 | 5157 | 3188 | 3167 | 50.2 | 40.9 | 0.1 | 173 | 74.5 | 45.1 | 40 | 52.3 |
| 1638 | 2658 | 18077 | 18097 | 51.5 | 47.6 | 5158 | 18696 | 18673 | 53.4 | 41.7 | 1.9 | 620 | 76.2 | 42.4 | 40 | 53.9 |
| 1639 | 2659 | 18077 | 18097 | 51.5 | 47.6 | 5159 | 18697 | 18679 | 51.9 | 52.6 | 0.3 | 621 | 76.2 | 42.5 | 40 | 53.9 |
| 1640 | 2660 | 9352 | 9371 | 50.6 | 45 | 5160 | 9989 | 9968 | 51 | 40.9 | 0.4 | 638 | 75.4 | 40.3 | 40 | 53 |
| 1641 | 2661 | 6042 | 6062 | 50.4 | 47.6 | 5161 | 6374 | 6353 | 50 | 40.9 | 0.3 | 333 | 74.6 | 40.8 | 40 | 52.3 |
| 1642 | 2662 | 942 | 960 | 52.1 | 52.6 | 5162 | 1697 | 1678 | 50.3 | 45 | 1.8 | 756 | 77.2 | 44.3 | 40 | 54.2 |
| 1643 | 2663 | 942 | 960 | 52.1 | 52.6 | 5163 | 1697 | 1677 | 51 | 42.9 | 1.1 | 756 | 77.2 | 44.3 | 40 | 54.4 |
| 1644 | 2664 | 6042 | 6062 | 50.4 | 47.6 | 5164 | 6292 | 6273 | 50.8 | 45 | 0.4 | 251 | 73.9 | 40.6 | 40 | 51.9 |
| 1645 | 2665 | 942 | 960 | 52.1 | 52.6 | 5165 | 1697 | 1676 | 51.7 | 40.9 | 0.5 | 756 | 77.2 | 44.3 | 40 | 54.6 |
| 1646 | 2666 | 942 | 960 | 52.1 | 52.6 | 5166 | 1694 | 1673 | 51.7 | 40.9 | 0.4 | 753 | 77.2 | 44.4 | 40 | 54.7 |
| 1647 | 2667 | 13176 | 13196 | 51.4 | 47.6 | 5167 | 13749 | 13727 | 50.5 | 43.5 | 0.9 | 574 | 76.2 | 42.7 | 40 | 53.6 |
| 1648 | 2668 | 13176 | 13196 | 51.4 | 47.6 | 5168 | 13949 | 13932 | 51.6 | 50 | 0.2 | 774 | 75.9 | 41.1 | 40 | 53.6 |
| 1649 | 2669 | 942 | 960 | 52.1 | 52.6 | 5169 | 1493 | 1473 | 52 | 47.6 | 0.1 | 552 | 76.9 | 44.4 | 40 | 54.5 |
| 1650 | 2670 | 6042 | 6062 | 50.4 | 47.6 | 5170 | 6292 | 6272 | 51.5 | 42.9 | 1.1 | 251 | 73.9 | 40.6 | 40 | 51.9 |
| 1651 | 2671 | 6042 | 6062 | 50.4 | 47.6 | 5171 | 6290 | 6270 | 50.9 | 42.9 | 0.6 | 249 | 73.8 | 40.6 | 40 | 51.9 |
| 1652 | 2672 | 6042 | 6062 | 50.4 | 47.6 | 5172 | 6289 | 6267 | 52.2 | 43.5 | 1.8 | 248 | 73.9 | 40.7 | 40 | 51.9 |
| 1653 | 2673 | 9402 | 9420 | 51.3 | 47.4 | 5173 | 10017 | 9999 | 52.8 | 52.6 | 1.4 | 616 | 75.6 | 41.1 | 40 | 53.5 |
| 1654 | 2674 | 943 | 961 | 50.3 | 47.4 | 5174 | 1697 | 1678 | 50.3 | 45 | 0 | 755 | 77.1 | 44.2 | 40 | 54.2 |
| 1655 | 2675 | 9139 | 9159 | 52.5 | 47.6 | 5175 | 9324 | 9300 | 52.9 | 40 | 0.4 | 186 | 73.9 | 43 | 40 | 52.6 |
| 1656 | 2676 | 9139 | 9159 | 52.5 | 47.6 | 5176 | 9324 | 9301 | 52.4 | 41.7 | 0.1 | 186 | 73.9 | 43 | 40 | 52.6 |
| 1657 | 2677 | 943 | 961 | 50.3 | 47.4 | 5177 | 1697 | 1677 | 51 | 42.9 | 0.7 | 755 | 77.1 | 44.2 | 40 | 54.2 |
| 1658 | 2678 | 6222 | 6246 | 52.2 | 40 | 5178 | 6486 | 6467 | 50.8 | 45 | 1.4 | 265 | 73.8 | 40 | 40 | 52 |
| 1659 | 2679 | 3895 | 3914 | 50.3 | 45 | 5179 | 4608 | 4590 | 51.5 | 52.6 | 1.2 | 714 | 75.5 | 40.3 | 40 | 53 |
| 1660 | 2680 | 3889 | 3911 | 54.2 | 47.8 | 5180 | 4610 | 4590 | 53.2 | 52.4 | 1.1 | 722 | 75.5 | 40.4 | 40 | 53.9 |
| 1661 | 2681 | 3889 | 3908 | 51.3 | 50 | 5181 | 4608 | 4590 | 51.5 | 52.6 | 0.3 | 720 | 75.5 | 40.4 | 40 | 53.4 |
| 1662 | 2682 | 9139 | 9159 | 52.5 | 47.6 | 5182 | 9359 | 9335 | 54.5 | 40 | 1.9 | 221 | 74.7 | 43.4 | 40 | 53.1 |
| 1663 | 2683 | 943 | 961 | 50.3 | 47.4 | 5183 | 1697 | 1676 | 51.7 | 40.9 | 1.4 | 755 | 77.1 | 44.2 | 40 | 54.2 |
| 1664 | 2684 | 943 | 961 | 50.3 | 47.4 | 5184 | 1694 | 1673 | 51.7 | 40.9 | 1.5 | 752 | 77.2 | 44.3 | 40 | 54.2 |
| 1665 | 2685 | 6302 | 6321 | 51.4 | 50 | 5185 | 6483 | 6463 | 50.2 | 42.9 | 1.2 | 182 | 72.9 | 40.7 | 40 | 51.2 |
| 1666 | 2686 | 9409 | 9428 | 51.6 | 45 | 5186 | 10017 | 9999 | 52.8 | 52.6 | 1.2 | 609 | 75.6 | 41.1 | 40 | 53.5 |
| 1667 | 2687 | 943 | 961 | 50.3 | 47.4 | 5187 | 1493 | 1473 | 52 | 47.6 | 1.7 | 551 | 76.8 | 44.3 | 40 | 54 |
| 1668 | 2688 | 13039 | 13058 | 51.8 | 50 | 5188 | 13312 | 13294 | 51 | 52.6 | 0.8 | 274 | 75.7 | 44.5 | 40 | 53.4 |
| 1669 | 2689 | 3799 | 3820 | 52.9 | 45.5 | 5189 | 4565 | 4542 | 53.9 | 41.7 | 1 | 767 | 75.5 | 40.2 | 40 | 53.8 |
| 1670 | 2690 | 985 | 1004 | 51.1 | 50 | 5190 | 1481 | 1463 | 50.5 | 47.4 | 0.6 | 497 | 76.4 | 43.5 | 40 | 53.7 |
| 1671 | 2691 | 13039 | 13058 | 51.8 | 50 | 5191 | 13325 | 13305 | 50.5 | 47.6 | 1.3 | 287 | 75.8 | 44.6 | 40 | 53.3 |
| 1672 | 2692 | 7615 | 7635 | 51.1 | 47.6 | 5192 | 8049 | 8032 | 50.4 | 50 | 0.8 | 435 | 75.7 | 42.3 | 40 | 53.2 |
| 1673 | 2693 | 7615 | 7635 | 51.1 | 47.6 | 5193 | 7853 | 7833 | 50.7 | 47.6 | 0.4 | 239 | 74.4 | 42.3 | 40 | 52.4 |
| 1674 | 2694 | 3034 | 3053 | 50.3 | 50 | 5194 | 3503 | 3484 | 51.5 | 50 | 1.2 | 470 | 76.3 | 43.4 | 40 | 53.6 |
| 1675 | 2695 | 9140 | 9159 | 50.1 | 45 | 5195 | 9334 | 9315 | 52.1 | 50 | 2 | 195 | 74.3 | 43.6 | 40 | 52.1 |
| 1676 | 2696 | 3799 | 3819 | 51.3 | 47.6 | 5196 | 4186 | 4168 | 51.8 | 52.6 | 0.5 | 388 | 75.3 | 41.8 | 40 | 53.2 |
| 1677 | 2697 | 3799 | 3819 | 51.3 | 47.6 | 5197 | 4434 | 4416 | 51.5 | 52.6 | 0.2 | 636 | 75.3 | 40.3 | 40 | 53.2 |
| 1678 | 2698 | 3799 | 3819 | 51.3 | 47.6 | 5198 | 4435 | 4417 | 50.5 | 52.6 | 0.8 | 637 | 75.4 | 40.3 | 40 | 53 |
| 1679 | 2699 | 7617 | 7636 | 50.9 | 50 | 5199 | 8190 | 8172 | 50.3 | 47.4 | 0.6 | 574 | 76.1 | 42.3 | 40 | 53.4 |
| 1680 | 2700 | 18011 | 18032 | 55.7 | 54.5 | 5200 | 18443 | 18424 | 55.9 | 55 | 0.2 | 433 | 76.1 | 43.2 | 40 | 55.1 |
| 1681 | 2701 | 18013 | 18032 | 52.2 | 55 | 5201 | 18696 | 18672 | 53.9 | 40 | 1.7 | 684 | 76.3 | 42.4 | 40 | 54.2 |
| 1682 | 2702 | 18013 | 18032 | 52.2 | 55 | 5202 | 18696 | 18673 | 53.4 | 41.7 | 1.2 | 684 | 76.3 | 42.4 | 40 | 54.2 |
| 1683 | 2703 | 13177 | 13197 | 50.3 | 42.9 | 5203 | 13545 | 13527 | 50.3 | 52.6 | 0 | 369 | 77 | 46.1 | 40 | 54.1 |
| 1684 | 2704 | 9922 | 9941 | 51.3 | 50 | 5204 | 10455 | 10434 | 51.1 | 40.9 | 0.1 | 534 | 75.3 | 40.6 | 40 | 53.1 |
| 1685 | 2705 | 7617 | 7636 | 50.9 | 50 | 5205 | 7853 | 7833 | 50.7 | 47.6 | 0.3 | 237 | 74.4 | 42.2 | 40 | 52.4 |
| 1686 | 2706 | 13177 | 13197 | 50.3 | 42.9 | 5206 | 13329 | 13308 | 50.5 | 40.9 | 0.2 | 153 | 73.2 | 43.1 | 40 | 51.4 |
| 1687 | 2707 | 18014 | 18032 | 51 | 52.6 | 5207 | 18238 | 18219 | 50.3 | 45 | 0.7 | 225 | 74.8 | 43.6 | 40 | 52.5 |
| 1688 | 2708 | 18014 | 18032 | 51 | 52.6 | 5208 | 18239 | 18220 | 50 | 45 | 0.9 | 226 | 74.7 | 43.4 | 40 | 52.4 |
| 1689 | 2709 | 18014 | 18032 | 51 | 52.6 | 5209 | 18697 | 18679 | 51.9 | 52.6 | 0.9 | 684 | 76.3 | 42.4 | 40 | 53.8 |
| 1690 | 2710 | 7708 | 7730 | 50.6 | 43.5 | 5210 | 7853 | 7833 | 50.7 | 47.6 | 0.1 | 146 | 71.8 | 40.4 | 40 | 50.6 |
| 1691 | 2711 | 9140 | 9159 | 50.1 | 45 | 5211 | 9358 | 9338 | 51 | 42.9 | 0.9 | 219 | 74.4 | 42.9 | 40 | 52.2 |
| 1692 | 2712 | 7723 | 7741 | 52.2 | 52.6 | 5212 | 7856 | 7836 | 51.1 | 42.9 | 1.1 | 134 | 71.4 | 40.3 | 40 | 50.4 |
| 1693 | 2713 | 988 | 1006 | 52.2 | 52.6 | 5213 | 1171 | 1153 | 50.4 | 47.4 | 1.8 | 184 | 73.8 | 42.9 | 40 | 51.9 |
| 1694 | 2714 | 13177 | 13197 | 50.3 | 42.9 | 5214 | 13328 | 13307 | 51.2 | 45.5 | 0.9 | 152 | 73.3 | 43.4 | 40 | 51.5 |
| 1695 | 2715 | 9935 | 9955 | 50.4 | 42.9 | 5215 | 10608 | 10589 | 51 | 50 | 0.6 | 674 | 75.8 | 41.1 | 40 | 53.2 |
| 1696 | 2716 | 985 | 1008 | 56.1 | 50 | 5216 | 1484 | 1463 | 55.5 | 50 | 0.5 | 500 | 76.4 | 43.6 | 40 | 55.3 |
| 1697 | 2717 | 13033 | 13051 | 52.1 | 52.6 | 5217 | 13179 | 13158 | 50.4 | 40.9 | 1.7 | 147 | 74.3 | 46.3 | 40 | 52.2 |
| 1698 | 2718 | 12977 | 12996 | 50.2 | 40 | 5218 | 13320 | 13300 | 51.4 | 47.6 | 1.1 | 344 | 76.1 | 44.2 | 40 | 53.4 |
| 1699 | 2719 | 12977 | 12996 | 50.2 | 40 | 5219 | 13321 | 13301 | 50.3 | 42.9 | 0.1 | 345 | 76 | 44.1 | 40 | 53.4 |
| 1700 | 2720 | 2823 | 2844 | 50.4 | 45.5 | 5220 | 3192 | 3171 | 51.9 | 50 | 1.5 | 370 | 75.7 | 43 | 40 | 53.2 |
| 1701 | 2721 | 18009 | 18030 | 54.6 | 54.5 | 5221 | 18443 | 18424 | 55.9 | 55 | 1.4 | 435 | 76.1 | 43.2 | 40 | 54.7 |
| 1702 | 2722 | 12976 | 12995 | 51.1 | 45 | 5222 | 13320 | 13300 | 51.4 | 47.6 | 0.3 | 345 | 76.1 | 44.3 | 40 | 53.7 |
| 1703 | 2723 | 1046 | 1064 | 51.2 | 47.4 | 5223 | 1531 | 1512 | 52.7 | 55 | 1.5 | 486 | 76.7 | 44.2 | 40 | 54.1 |
| 1704 | 2724 | 12976 | 12995 | 51.1 | 45 | 5224 | 13321 | 13301 | 50.3 | 42.9 | 0.8 | 346 | 76.1 | 44.2 | 40 | 53.5 |
| 1705 | 2725 | 12976 | 12994 | 50.3 | 47.4 | 5225 | 13320 | 13300 | 51.4 | 47.6 | 1.1 | 345 | 76.1 | 44.3 | 40 | 53.5 |
| 1706 | 2726 | 12976 | 12994 | 50.3 | 47.4 | 5226 | 13321 | 13301 | 50.3 | 42.9 | 0 | 346 | 76.1 | 44.2 | 40 | 53.5 |
| 1707 | 2727 | 18011 | 18030 | 52.9 | 55 | 5227 | 18696 | 18672 | 53.9 | 40 | 1 | 686 | 76.3 | 42.4 | 40 | 54.4 |
| 1708 | 2728 | 18011 | 18030 | 52.9 | 55 | 5228 | 18696 | 18673 | 53.4 | 41.7 | 0.5 | 686 | 76.3 | 42.4 | 40 | 54.4 |
| 1709 | 2729 | 18011 | 18030 | 52.9 | 55 | 5229 | 18697 | 18679 | 51.9 | 52.6 | 1 | 687 | 76.3 | 42.5 | 40 | 54.1 |
| 1710 | 2730 | 9140 | 9159 | 50.1 | 45 | 5230 | 9374 | 9353 | 50.1 | 40.9 | 0 | 235 | 74.5 | 42.6 | 40 | 52.3 |
| 1711 | 2731 | 3 | 23 | 55.4 | 52.4 | 5231 | 204 | 185 | 56.6 | 55 | 1.3 | 202 | 75 | 45 | 40 | 54.2 |
| 1712 | 2732 | 15255 | 15273 | 50.3 | 52.6 | 5232 | 15761 | 15741 | 51.7 | 47.6 | 1.4 | 507 | 75 | 40 | 40 | 52.7 |
| 1713 | 2733 | 15255 | 15273 | 50.3 | 52.6 | 5233 | 15763 | 15743 | 52 | 47.6 | 1.7 | 509 | 75 | 40.1 | 40 | 52.7 |
| 1714 | 2734 | 12965 | 12985 | 51.2 | 42.9 | 5234 | 13320 | 13300 | 51.4 | 47.6 | 0.2 | 356 | 76.1 | 44.1 | 40 | 53.7 |
| 1715 | 2735 | 8373 | 8391 | 50.7 | 47.4 | 5235 | 9060 | 9039 | 50.3 | 40.9 | 0.4 | 688 | 75.4 | 40.1 | 40 | 53 |
| 1716 | 2736 | 12962 | 12980 | 50.7 | 47.4 | 5236 | 13320 | 13300 | 51.4 | 47.6 | 0.7 | 359 | 76.2 | 44.3 | 40 | 53.6 |
| 1717 | 2737 | 12938 | 12957 | 50.9 | 45 | 5237 | 13155 | 13137 | 52.1 | 52.6 | 1.2 | 218 | 75.4 | 45.4 | 40 | 53.2 |
| 1718 | 2738 | 2671 | 2692 | 52.1 | 40.9 | 5238 | 3190 | 3169 | 50.7 | 45.5 | 1.5 | 520 | 75.6 | 41.5 | 40 | 53.2 |
| 1719 | 2739 | 2671 | 2692 | 52.1 | 40.9 | 5239 | 3192 | 3171 | 51.9 | 50 | 0.2 | 522 | 75.7 | 41.8 | 40 | 53.7 |
| 1720 | 2740 | 12938 | 12956 | 50.1 | 47.4 | 5240 | 13155 | 13137 | 52.1 | 52.6 | 2 | 218 | 75.4 | 45.4 | 40 | 52.9 |
| 1721 | 2741 | 26421 | 26441 | 51.5 | 42.9 | 5241 | 26592 | 26574 | 52.4 | 52.6 | 0.9 | 172 | 72.4 | 40.1 | 40 | 51.2 |
| 1722 | 2742 | 18006 | 18028 | 54.5 | 52.2 | 5242 | 18443 | 18424 | 55.9 | 55 | 1.4 | 438 | 76.1 | 43.2 | 40 | 54.7 |
| 1723 | 2743 | 26421 | 26441 | 51.5 | 42.9 | 5243 | 26656 | 26635 | 52.9 | 45.5 | 1.4 | 236 | 74.2 | 41.9 | 40 | 52.5 |
| 1724 | 2744 | 3055 | 3074 | 51.1 | 50 | 5244 | 3210 | 3190 | 50.5 | 47.6 | 0.6 | 156 | 74.2 | 45.5 | 40 | 52.2 |
| 1725 | 2745 | 7833 | 7853 | 50.7 | 47.6 | 5245 | 8189 | 8170 | 50.6 | 50 | 0 | 357 | 75.6 | 42.9 | 40 | 53.2 |
| 1726 | 2746 | 26421 | 26441 | 51.5 | 42.9 | 5246 | 26658 | 26640 | 50.8 | 47.4 | 0.7 | 238 | 74.1 | 41.6 | 40 | 52.2 |
| 1727 | 2747 | 9131 | 9151 | 50.4 | 42.9 | 5247 | 9328 | 9310 | 51 | 52.6 | 0.7 | 198 | 74.3 | 43.4 | 40 | 52.2 |
| 1728 | 2748 | 24921 | 24938 | 50.4 | 50 | 5248 | 25650 | 25631 | 51.3 | 45 | 0.9 | 730 | 75.5 | 40.4 | 40 | 53.1 |
| 1729 | 2749 | 24921 | 24938 | 50.4 | 50 | 5249 | 25651 | 25634 | 50.4 | 50 | 0 | 731 | 75.6 | 40.5 | 40 | 53.1 |
| 1730 | 2750 | 9130 | 9151 | 52 | 40.9 | 5250 | 9324 | 9301 | 52.4 | 41.7 | 0.5 | 195 | 73.9 | 42.6 | 40 | 52.4 |
| 1731 | 2751 | 9130 | 9151 | 52 | 40.9 | 5251 | 9324 | 9300 | 52.9 | 40 | 1 | 195 | 73.9 | 42.6 | 40 | 52.4 |
| 1732 | 2752 | 8376 | 8396 | 50.6 | 42.9 | 5252 | 9107 | 9086 | 51.6 | 45.5 | 1 | 732 | 75.4 | 40 | 40 | 53.1 |
| 1733 | 2753 | 11541 | 11561 | 50.9 | 42.9 | 5253 | 11727 | 11708 | 50.4 | 45 | 0.5 | 187 | 73 | 40.6 | 40 | 51.3 |
| 1734 | 2754 | 11540 | 11561 | 53.8 | 45.5 | 5254 | 11984 | 11966 | 53 | 52.6 | 0.7 | 445 | 75.1 | 40.7 | 40 | 53.6 |
| 1735 | 2755 | 2371 | 2389 | 50.3 | 47.4 | 5255 | 2672 | 2654 | 50.9 | 52.6 | 0.5 | 302 | 77.1 | 47.4 | 40 | 54.2 |
| 1736 | 2756 | 2371 | 2389 | 50.3 | 47.4 | 5256 | 2998 | 2977 | 51.1 | 40.9 | 0.8 | 628 | 76.7 | 43.5 | 40 | 53.9 |
| 1737 | 2757 | 11543 | 11562 | 50.4 | 40 | 5257 | 11727 | 11708 | 50.4 | 45 | 0.1 | 185 | 72.9 | 40.5 | 40 | 51.2 |
| 1738 | 2758 | 26040 | 26061 | 56.4 | 54.5 | 5258 | 26589 | 26567 | 56.1 | 47.8 | 0.4 | 550 | 75.1 | 40 | 40 | 54.5 |
| 1739 | 2759 | 11541 | 11562 | 51.5 | 40.9 | 5259 | 11984 | 11966 | 53 | 52.6 | 1.5 | 444 | 75 | 40.5 | 40 | 53.1 |
| 1740 | 2760 | 7728 | 7746 | 51.7 | 52.6 | 5260 | 8187 | 8167 | 50.4 | 42.9 | 1.3 | 460 | 75.6 | 42 | 40 | 53.2 |
| 1741 | 2761 | 26040 | 26061 | 56.4 | 54.5 | 5261 | 26657 | 26634 | 54.6 | 41.7 | 1.9 | 618 | 75.5 | 40.6 | 40 | 54.3 |
| 1742 | 2762 | 2223 | 2243 | 50.2 | 42.9 | 5262 | 2675 | 2656 | 50.4 | 50 | 0.2 | 453 | 77 | 45.3 | 40 | 54 |
| 1743 | 2763 | 2220 | 2239 | 51.3 | 45 | 5263 | 2676 | 2657 | 50.7 | 50 | 0.5 | 457 | 76.9 | 45.1 | 40 | 54.1 |
| 1744 | 2764 | 11541 | 11560 | 50.1 | 45 | 5264 | 11727 | 11707 | 51.1 | 42.9 | 1 | 187 | 73 | 40.6 | 40 | 51.2 |
| 1745 | 2765 | 24559 | 24580 | 54.2 | 54.5 | 5265 | 25088 | 25070 | 54.5 | 52.6 | 0.2 | 530 | 75.5 | 41.1 | 40 | 54.2 |
| 1746 | 2766 | 12233 | 12251 | 51.1 | 52.6 | 5266 | 12998 | 12979 | 50.1 | 45 | 1 | 766 | 76.5 | 42.6 | 40 | 53.7 |
| 1747 | 2767 | 12233 | 12251 | 51.1 | 52.6 | 5267 | 12412 | 12392 | 50 | 42.9 | 1.1 | 180 | 73.2 | 41.7 | 40 | 51.4 |
| 1748 | 2768 | 24562 | 24580 | 50.1 | 52.6 | 5268 | 25086 | 25069 | 50.3 | 50 | 0.2 | 525 | 75.4 | 41 | 40 | 52.9 |
| 1749 | 2769 | 9931 | 9950 | 50.2 | 45 | 5269 | 10608 | 10589 | 51 | 50 | 0.8 | 678 | 75.8 | 41.2 | 40 | 53.2 |
| 1750 | 2770 | 24562 | 24580 | 50.1 | 52.6 | 5270 | 25209 | 25188 | 52 | 45.5 | 1.9 | 648 | 76.1 | 42 | 40 | 53.4 |
| 1751 | 2771 | 24562 | 24580 | 50.1 | 52.6 | 5271 | 25209 | 25189 | 51.4 | 47.6 | 1.3 | 648 | 76.1 | 42 | 40 | 53.4 |
| 1752 | 2772 | 3789 | 3807 | 51.8 | 52.6 | 5272 | 4445 | 4425 | 50.6 | 42.9 | 1.2 | 657 | 75.5 | 40.5 | 40 | 53.1 |
| 1753 | 2773 | 26039 | 26058 | 54 | 55 | 5273 | 26656 | 26634 | 53.4 | 43.5 | 0.6 | 618 | 75.5 | 40.6 | 40 | 53.9 |
| 1754 | 2774 | 26039 | 26058 | 54 | 55 | 5274 | 26660 | 26639 | 52.5 | 45.5 | 1.5 | 622 | 75.4 | 40.5 | 40 | 53.7 |
| 1755 | 2775 | 3789 | 3807 | 51.8 | 52.6 | 5275 | 4444 | 4424 | 50.6 | 42.9 | 1.2 | 656 | 75.5 | 40.5 | 40 | 53.1 |
| 1756 | 2776 | 24559 | 24579 | 52 | 52.4 | 5276 | 25086 | 25069 | 50.3 | 50 | 1.6 | 528 | 75.5 | 41.1 | 40 | 53 |
| 1757 | 2777 | 12235 | 12253 | 50.1 | 52.6 | 5277 | 12999 | 12980 | 50.6 | 40 | 0.5 | 765 | 76.4 | 42.5 | 40 | 53.6 |
| 1758 | 2778 | 24559 | 24579 | 52 | 52.4 | 5278 | 25209 | 25188 | 52 | 45.5 | 0 | 651 | 76.1 | 42.1 | 40 | 54 |
| 1759 | 2779 | 24559 | 24579 | 52 | 52.4 | 5279 | 25209 | 25189 | 51.4 | 47.6 | 0.6 | 651 | 76.1 | 42.1 | 40 | 53.8 |
| 1760 | 2780 | 887 | 905 | 50.1 | 47.4 | 5280 | 1499 | 1482 | 50.1 | 50 | 0.1 | 613 | 77.1 | 44.7 | 40 | 54.1 |
| 1761 | 2781 | 24558 | 24577 | 50.7 | 50 | 5281 | 25182 | 25164 | 51.4 | 47.4 | 0.7 | 625 | 76 | 41.9 | 40 | 53.5 |
| 1762 | 2782 | 26039 | 26058 | 54 | 55 | 5282 | 26828 | 26810 | 52.9 | 52.6 | 1.2 | 790 | 76.4 | 42.4 | 40 | 54.5 |
| 1763 | 2783 | 8866 | 8885 | 51.1 | 45 | 5283 | 9597 | 9577 | 50.3 | 42.9 | 0.8 | 732 | 75.8 | 41.1 | 40 | 53.3 |
| 1764 | 2784 | 7727 | 7745 | 50.8 | 47.4 | 5284 | 8049 | 8032 | 50.4 | 50 | 0.5 | 323 | 74.8 | 41.5 | 40 | 52.6 |
| 1765 | 2785 | 13177 | 13197 | 50.3 | 42.9 | 5285 | 13747 | 13726 | 50.8 | 40.9 | 0.4 | 571 | 76.2 | 42.6 | 40 | 53.5 |
| 1766 | 2786 | 887 | 905 | 50.1 | 47.4 | 5286 | 1498 | 1481 | 51 | 50 | 0.9 | 612 | 77.2 | 44.8 | 40 | 54.1 |
| 1767 | 2787 | 1784 | 1803 | 52.5 | 50 | 5287 | 2103 | 2083 | 50.6 | 42.9 | 2 | 320 | 76 | 44.4 | 40 | 53.5 |
| 1768 | 2788 | 12235 | 12253 | 50.1 | 52.6 | 5288 | 12498 | 12480 | 50 | 47.4 | 0.1 | 264 | 74.7 | 42.4 | 40 | 52.4 |
| 1769 | 2789 | 1784 | 1802 | 51.8 | 52.6 | 5289 | 2103 | 2083 | 50.6 | 42.9 | 1.3 | 320 | 76 | 44.4 | 40 | 53.5 |
| 1770 | 2790 | 887 | 905 | 50.1 | 47.4 | 5290 | 1496 | 1478 | 50.4 | 47.4 | 0.3 | 610 | 77.1 | 44.8 | 40 | 54.1 |
| 1771 | 2791 | 1783 | 1801 | 52.9 | 52.6 | 5291 | 2153 | 2133 | 52.1 | 42.9 | 0.9 | 371 | 76 | 43.7 | 40 | 53.9 |
| 1772 | 2792 | 887 | 905 | 50.1 | 47.4 | 5292 | 1494 | 1476 | 50.7 | 47.4 | 0.6 | 608 | 77.1 | 44.7 | 40 | 54.1 |
| 1773 | 2793 | 3791 | 3809 | 51.8 | 52.6 | 5293 | 4445 | 4425 | 50.6 | 42.9 | 1.2 | 655 | 75.5 | 40.5 | 40 | 53.1 |
| 1774 | 2794 | 17813 | 17832 | 50.1 | 45 | 5294 | 18506 | 18488 | 51.2 | 52.6 | 1.2 | 694 | 75.8 | 41.2 | 40 | 53.2 |
| 1775 | 2795 | 3791 | 3809 | 51.8 | 52.6 | 5295 | 4444 | 4424 | 50.6 | 42.9 | 1.2 | 654 | 75.5 | 40.5 | 40 | 53.1 |
| 1776 | 2796 | 17840 | 17859 | 50.8 | 45 | 5296 | 18233 | 18215 | 51.3 | 52.6 | 0.5 | 394 | 74.9 | 40.9 | 40 | 52.8 |
| 1777 | 2797 | 17840 | 17859 | 50.8 | 45 | 5297 | 18233 | 18214 | 52 | 50 | 1.3 | 394 | 74.9 | 40.9 | 40 | 52.8 |
| 1778 | 2798 | 9930 | 9949 | 52.2 | 50 | 5298 | 10356 | 10336 | 52.4 | 47.6 | 0.2 | 427 | 75.6 | 42.2 | 40 | 53.7 |
| 1779 | 2799 | 15211 | 15230 | 50.2 | 45 | 5299 | 15949 | 15930 | 51.1 | 45 | 0.9 | 739 | 75.5 | 40.3 | 40 | 53 |
| 1780 | 2800 | 98 | 118 | 50.6 | 42.9 | 5300 | 253 | 233 | 51.8 | 47.6 | 1.2 | 156 | 74.5 | 46.2 | 40 | 52.4 |
| 1781 | 2801 | 18004 | 18023 | 51.1 | 50 | 5301 | 18233 | 18214 | 52 | 50 | 0.9 | 230 | 75 | 43.9 | 40 | 52.9 |
| 1782 | 2802 | 24420 | 24440 | 50.8 | 42.9 | 5302 | 24936 | 24919 | 51.8 | 50 | 1 | 517 | 75.9 | 42.2 | 40 | 53.5 |
| 1783 | 2803 | 24420 | 24440 | 50.8 | 42.9 | 5303 | 24938 | 24921 | 50.4 | 50 | 0.4 | 519 | 75.8 | 42 | 40 | 53.3 |
| 1784 | 2804 | 98 | 118 | 50.6 | 42.9 | 5304 | 254 | 235 | 50 | 45 | 0.6 | 157 | 74.4 | 45.9 | 40 | 52.2 |
| 1785 | 2805 | 11540 | 11557 | 50.4 | 50 | 5305 | 11727 | 11707 | 51.1 | 42.9 | 0.7 | 188 | 73.1 | 41 | 40 | 51.4 |
| 1786 | 2806 | 98 | 118 | 50.6 | 42.9 | 5306 | 642 | 622 | 51.6 | 47.6 | 0.9 | 545 | 79.1 | 49.7 | 40 | 55.6 |
| 1787 | 2807 | 15211 | 15230 | 50.2 | 45 | 5307 | 15595 | 15576 | 50.8 | 45 | 0.6 | 385 | 75.1 | 41.3 | 40 | 52.7 |
| 1788 | 2808 | 15255 | 15273 | 50.3 | 52.6 | 5308 | 15767 | 15747 | 50 | 42.9 | 0.3 | 513 | 75.1 | 40.2 | 40 | 52.6 |
| 1789 | 2809 | 12373 | 12391 | 50.8 | 47.4 | 5309 | 12911 | 12891 | 51.2 | 47.6 | 0.4 | 539 | 76.1 | 42.5 | 40 | 53.6 |
| 1790 | 2810 | 18009 | 18028 | 51.6 | 55 | 5310 | 18697 | 18679 | 51.9 | 52.6 | 0.2 | 689 | 76.4 | 42.5 | 40 | 54 |
| 1791 | 2811 | 18009 | 18028 | 51.6 | 55 | 5311 | 18696 | 18673 | 53.4 | 41.7 | 1.8 | 688 | 76.3 | 42.4 | 40 | 54 |
| 1792 | 2812 | 18009 | 18028 | 51.6 | 55 | 5312 | 18239 | 18220 | 50 | 45 | 1.6 | 231 | 74.9 | 43.7 | 40 | 52.5 |
| 1793 | 2813 | 18009 | 18028 | 51.6 | 55 | 5313 | 18238 | 18219 | 50.3 | 45 | 1.4 | 230 | 75 | 43.9 | 40 | 52.7 |
| 1794 | 2814 | 24417 | 24436 | 52.6 | 50 | 5314 | 25079 | 25061 | 52.7 | 52.6 | 0.1 | 663 | 75.8 | 41.3 | 40 | 54 |
| 1795 | 2815 | 10250 | 10271 | 50.6 | 45.5 | 5315 | 10356 | 10336 | 52.4 | 47.6 | 1.8 | 107 | 70.8 | 42.1 | 40 | 49.9 |
| 1796 | 2816 | 1356 | 1375 | 53.8 | 55 | 5316 | 1484 | 1464 | 54.3 | 47.6 | 0.5 | 129 | 74.4 | 48.1 | 40 | 53.3 |
| 1797 | 2817 | 1356 | 1375 | 53.8 | 55 | 5317 | 1484 | 1465 | 53.8 | 50 | 0 | 129 | 74.4 | 48.1 | 40 | 53.3 |
| 1798 | 2818 | 1356 | 1375 | 53.8 | 55 | 5318 | 1484 | 1466 | 53.1 | 52.6 | 0.7 | 129 | 74.4 | 48.1 | 40 | 53.1 |
| 1799 | 2819 | 24418 | 24436 | 50 | 47.4 | 5319 | 24560 | 24542 | 50.2 | 47.4 | 0.1 | 143 | 72.4 | 42 | 40 | 50.8 |
| 1800 | 2820 | 18008 | 18028 | 53 | 52.4 | 5320 | 18696 | 18672 | 53.9 | 40 | 0.9 | 689 | 76.3 | 42.4 | 40 | 54.4 |
| 1801 | 2821 | 25363 | 25381 | 51.1 | 52.6 | 5321 | 25646 | 25627 | 50.5 | 45 | 0.7 | 284 | 74.1 | 40.5 | 40 | 52.1 |
| 1802 | 2822 | 9131 | 9151 | 50.4 | 42.9 | 5322 | 9333 | 9315 | 52.2 | 52.6 | 1.9 | 203 | 74.6 | 43.8 | 40 | 52.4 |
| 1803 | 2823 | 9131 | 9151 | 50.4 | 42.9 | 5323 | 9374 | 9353 | 50.1 | 40.9 | 0.3 | 244 | 74.6 | 42.6 | 40 | 52.4 |
| 1804 | 2824 | 24380 | 24399 | 55 | 55 | 5324 | 24582 | 24560 | 54.2 | 52.2 | 0.9 | 203 | 74.4 | 43.3 | 40 | 53.4 |
| 1805 | 2825 | 19802 | 19820 | 53 | 52.6 | 5325 | 19921 | 19900 | 51.8 | 45.5 | 1.2 | 120 | 72.4 | 44.2 | 40 | 51.3 |
| 1806 | 2826 | 3055 | 3075 | 51.8 | 47.6 | 5326 | 3210 | 3190 | 50.5 | 47.6 | 1.3 | 156 | 74.2 | 45.5 | 40 | 52.2 |
| 1807 | 2827 | 3055 | 3075 | 51.8 | 47.6 | 5327 | 3207 | 3187 | 50.5 | 47.6 | 1.3 | 153 | 74 | 45.1 | 40 | 52 |
| 1808 | 2828 | 3055 | 3076 | 52.4 | 45.5 | 5328 | 3210 | 3190 | 50.5 | 47.6 | 2 | 156 | 74.2 | 45.5 | 40 | 52.2 |
| 1809 | 2829 | 24379 | 24398 | 55 | 55 | 5329 | 24582 | 24560 | 54.2 | 52.2 | 0.9 | 204 | 74.3 | 43.1 | 40 | 53.3 |
| 1810 | 2830 | 7876 | 7895 | 51.5 | 45 | 5330 | 8054 | 8035 | 50.4 | 50 | 1.1 | 179 | 73.5 | 42.5 | 40 | 51.7 |
| 1811 | 2831 | 3055 | 3076 | 52.4 | 45.5 | 5331 | 3207 | 3187 | 50.5 | 47.6 | 2 | 153 | 74 | 45.1 | 40 | 52 |
| 1812 | 2832 | 9130 | 9150 | 51.3 | 42.9 | 5332 | 9324 | 9300 | 52.9 | 40 | 1.6 | 195 | 73.9 | 42.6 | 40 | 52.2 |
| 1813 | 2833 | 9130 | 9150 | 51.3 | 42.9 | 5333 | 9324 | 9301 | 52.4 | 41.7 | 1.1 | 195 | 73.9 | 42.6 | 40 | 52.2 |
| 1814 | 2834 | 8794 | 8813 | 51.6 | 45 | 5334 | 9324 | 9301 | 52.4 | 41.7 | 0.8 | 531 | 75.7 | 41.6 | 40 | 53.6 |
| 1815 | 2835 | 8794 | 8813 | 51.6 | 45 | 5335 | 9324 | 9300 | 52.9 | 40 | 1.3 | 531 | 75.7 | 41.6 | 40 | 53.6 |
| 1816 | 2836 | 9130 | 9150 | 51.3 | 42.9 | 5336 | 9328 | 9310 | 51 | 52.6 | 0.3 | 199 | 74.2 | 43.2 | 40 | 52.4 |
| 1817 | 2837 | 9130 | 9150 | 51.3 | 42.9 | 5337 | 9333 | 9315 | 52.2 | 52.6 | 0.9 | 204 | 74.5 | 43.6 | 40 | 52.6 |
| 1818 | 2838 | 24179 | 24200 | 53.3 | 40.9 | 5338 | 24807 | 24786 | 51.7 | 45.5 | 1.6 | 629 | 75.8 | 41.3 | 40 | 53.7 |
| 1819 | 2839 | 4593 | 4613 | 51.5 | 47.6 | 5339 | 4708 | 4690 | 50.3 | 47.4 | 1.3 | 116 | 71.4 | 42.2 | 40 | 50.2 |
| 1820 | 2840 | 9130 | 9150 | 51.3 | 42.9 | 5340 | 9374 | 9353 | 50.1 | 40.9 | 1.2 | 245 | 74.6 | 42.4 | 40 | 52.3 |
| 1821 | 2841 | 29180 | 29199 | 50.1 | 40 | 5341 | 29412 | 29393 | 50.3 | 45 | 0.2 | 233 | 75.5 | 45.1 | 40 | 53 |
| 1822 | 2842 | 25348 | 25366 | 51.2 | 47.4 | 5342 | 25772 | 25753 | 51.9 | 50 | 0.8 | 425 | 74.9 | 40.5 | 40 | 52.9 |
| 1823 | 2843 | 24179 | 24200 | 53.3 | 40.9 | 5343 | 24815 | 24792 | 53.4 | 41.7 | 0.2 | 637 | 75.8 | 41.3 | 40 | 54.1 |
| 1824 | 2844 | 8794 | 8813 | 51.6 | 45 | 5344 | 9101 | 9081 | 50.5 | 47.6 | 1.2 | 308 | 74.8 | 41.6 | 40 | 52.6 |
| 1825 | 2845 | 16861 | 16880 | 50.8 | 50 | 5345 | 17056 | 17035 | 51.8 | 45.5 | 1 | 196 | 74.7 | 44.4 | 40 | 52.6 |
| 1826 | 2846 | 16562 | 16581 | 52.6 | 50 | 5346 | 17038 | 17021 | 50.7 | 50 | 1.9 | 477 | 75.7 | 41.9 | 40 | 53.3 |
| 1827 | 2847 | 16562 | 16581 | 52.6 | 50 | 5347 | 17039 | 17022 | 51.4 | 50 | 1.2 | 478 | 75.6 | 41.8 | 40 | 53.5 |
| 1828 | 2848 | 16562 | 16581 | 52.6 | 50 | 5348 | 17041 | 17023 | 53.5 | 52.6 | 0.9 | 480 | 75.7 | 41.9 | 40 | 53.8 |
| 1829 | 2849 | 3090 | 3110 | 50.3 | 42.9 | 5349 | 3647 | 3628 | 50.6 | 45 | 0.3 | 558 | 76.2 | 42.7 | 40 | 53.5 |
| 1830 | 2850 | 16562 | 16580 | 51.9 | 52.6 | 5350 | 17038 | 17021 | 50.7 | 50 | 1.2 | 477 | 75.7 | 41.9 | 40 | 53.3 |
| 1831 | 2851 | 16562 | 16580 | 51.9 | 52.6 | 5351 | 17039 | 17022 | 51.4 | 50 | 0.5 | 478 | 75.6 | 41.8 | 40 | 53.5 |
| 1832 | 2852 | 24178 | 24198 | 52.7 | 42.9 | 5352 | 24815 | 24792 | 53.4 | 41.7 | 0.7 | 638 | 75.7 | 41.2 | 40 | 53.9 |
| 1833 | 2853 | 16562 | 16580 | 51.9 | 52.6 | 5353 | 17041 | 17023 | 53.5 | 52.6 | 1.6 | 480 | 75.7 | 41.9 | 40 | 53.6 |
| 1834 | 2854 | 24179 | 24198 | 51 | 45 | 5354 | 24807 | 24786 | 51.7 | 45.5 | 0.7 | 629 | 75.8 | 41.3 | 40 | 53.5 |
| 1835 | 2855 | 24179 | 24198 | 51 | 45 | 5355 | 24818 | 24797 | 51.6 | 40.9 | 0.6 | 640 | 75.8 | 41.2 | 40 | 53.4 |
| 1836 | 2856 | 3090 | 3110 | 50.3 | 42.9 | 5356 | 3646 | 3625 | 52 | 40.9 | 1.7 | 557 | 76.1 | 42.5 | 40 | 53.5 |
| 1837 | 2857 | 3089 | 3110 | 51.8 | 45.5 | 5357 | 3650 | 3631 | 53.1 | 50 | 1.3 | 562 | 76.3 | 42.9 | 40 | 54 |
| 1838 | 2858 | 29259 | 29279 | 54 | 52.4 | 5358 | 29358 | 29339 | 52.8 | 50 | 1.1 | 100 | 72.4 | 47 | 40 | 51.6 |
| 1839 | 2859 | 8794 | 8813 | 51.6 | 45 | 5359 | 8928 | 8911 | 51.9 | 50 | 0.2 | 135 | 72.2 | 42.2 | 40 | 51.1 |
| 1840 | 2860 | 24176 | 24197 | 52.1 | 40.9 | 5360 | 24815 | 24792 | 53.4 | 41.7 | 1.3 | 640 | 75.8 | 41.2 | 40 | 53.8 |
| 1841 | 2861 | 29259 | 29277 | 50.9 | 52.6 | 5361 | 29358 | 29339 | 52.8 | 50 | 2 | 100 | 72.4 | 47 | 40 | 51.1 |
| 1842 | 2862 | 29257 | 29276 | 51.3 | 50 | 5362 | 29358 | 29339 | 52.8 | 50 | 1.5 | 102 | 72.6 | 47.1 | 40 | 51.3 |
| 1843 | 2863 | 9915 | 9935 | 51.8 | 47.6 | 5363 | 10017 | 9999 | 52.8 | 52.6 | 1 | 103 | 72.9 | 47.6 | 40 | 51.6 |
| 1844 | 2864 | 4639 | 4659 | 51.1 | 47.6 | 5364 | 5306 | 5288 | 52.4 | 52.6 | 1.3 | 668 | 75.6 | 40.9 | 40 | 53.4 |
| 1845 | 2865 | 24178 | 24197 | 50.3 | 40 | 5365 | 24807 | 24786 | 51.7 | 45.5 | 1.4 | 630 | 75.8 | 41.3 | 40 | 53.2 |
| 1846 | 2866 | 28653 | 28671 | 50.2 | 52.6 | 5366 | 29414 | 29395 | 50.5 | 50 | 0.3 | 762 | 78 | 46.2 | 40 | 54.7 |
| 1847 | 2867 | 28653 | 28671 | 50.2 | 52.6 | 5367 | 29412 | 29393 | 50.3 | 45 | 0.1 | 760 | 78 | 46.2 | 40 | 54.7 |
| 1848 | 2868 | 28652 | 28671 | 52.8 | 55 | 5368 | 29358 | 29339 | 52.8 | 50 | 0 | 707 | 78 | 46.4 | 40 | 55.5 |
| 1849 | 2869 | 15752 | 15772 | 50.8 | 47.6 | 5369 | 16213 | 16195 | 50.8 | 52.6 | 0 | 462 | 75.4 | 41.3 | 40 | 53.1 |
| 1850 | 2870 | 24178 | 24197 | 50.3 | 40 | 5370 | 24818 | 24797 | 51.6 | 40.9 | 1.4 | 641 | 75.7 | 41.2 | 40 | 53.2 |
| 1851 | 2871 | 19794 | 19814 | 51.7 | 47.6 | 5371 | 19909 | 19885 | 52.5 | 40 | 0.8 | 116 | 71.8 | 43.1 | 40 | 50.8 |
| 1852 | 2872 | 8866 | 8885 | 51.1 | 45 | 5372 | 9341 | 9322 | 51.1 | 50 | 0 | 476 | 75.6 | 41.8 | 40 | 53.4 |
| 1853 | 2873 | 15951 | 15973 | 52.1 | 43.5 | 5373 | 16175 | 16155 | 51.8 | 47.6 | 0.3 | 225 | 73.7 | 40.9 | 40 | 52.2 |
| 1854 | 2874 | 24174 | 24195 | 52.5 | 40.9 | 5374 | 24815 | 24791 | 54.5 | 40 | 2 | 642 | 75.8 | 41.3 | 40 | 53.9 |
| 1855 | 2875 | 8866 | 8885 | 51.1 | 45 | 5375 | 9340 | 9319 | 50.8 | 45.5 | 0.3 | 475 | 75.6 | 41.7 | 40 | 53.2 |
| 1856 | 2876 | 15951 | 15973 | 52.1 | 43.5 | 5376 | 16169 | 16151 | 51.3 | 52.6 | 0.8 | 219 | 73.5 | 40.6 | 40 | 51.9 |
| 1857 | 2877 | 15951 | 15974 | 53.3 | 41.7 | 5377 | 16175 | 16154 | 53.4 | 45.5 | 0.1 | 225 | 73.7 | 40.9 | 40 | 52.7 |
| 1858 | 2878 | 27437 | 27456 | 50.2 | 40 | 5378 | 27541 | 27521 | 51.7 | 47.6 | 1.5 | 105 | 71.8 | 44.8 | 40 | 50.4 |
| 1859 | 2879 | 15650 | 15674 | 52.9 | 40 | 5379 | 16210 | 16192 | 54.3 | 52.6 | 1.4 | 561 | 75.1 | 40.1 | 40 | 53.6 |
| 1860 | 2880 | 8866 | 8885 | 51.1 | 45 | 5380 | 9334 | 9316 | 51.3 | 52.6 | 0.2 | 469 | 75.7 | 42 | 40 | 53.4 |
| 1861 | 2881 | 8866 | 8885 | 51.1 | 45 | 5381 | 9310 | 9291 | 51.2 | 45 | 0.1 | 445 | 75.3 | 41.3 | 40 | 53.2 |
| 1862 | 2882 | 8866 | 8885 | 51.1 | 45 | 5382 | 9252 | 9234 | 51.4 | 52.6 | 0.3 | 387 | 75.1 | 41.3 | 40 | 53 |
| 1863 | 2883 | 3360 | 3379 | 50.7 | 45 | 5383 | 3494 | 3473 | 50.4 | 40.9 | 0.3 | 135 | 73.7 | 45.9 | 40 | 51.8 |
| 1864 | 2884 | 8866 | 8885 | 51.1 | 45 | 5384 | 9248 | 9229 | 50.1 | 45 | 1 | 383 | 75.1 | 41.3 | 40 | 52.7 |
| 1865 | 2885 | 18081 | 18099 | 51.2 | 52.6 | 5385 | 18697 | 18679 | 51.9 | 52.6 | 0.7 | 617 | 76.3 | 42.6 | 40 | 53.9 |
| 1866 | 2886 | 8865 | 8884 | 50.4 | 45 | 5386 | 9257 | 9238 | 50.5 | 45 | 0.1 | 393 | 75 | 41 | 40 | 52.7 |
| 1867 | 2887 | 18081 | 18099 | 51.2 | 52.6 | 5387 | 18239 | 18220 | 50 | 45 | 1.2 | 159 | 74 | 44.7 | 40 | 51.9 |
| 1868 | 2888 | 18081 | 18099 | 51.2 | 52.6 | 5388 | 18238 | 18219 | 50.3 | 45 | 0.9 | 158 | 74.1 | 44.9 | 40 | 52 |
| 1869 | 2889 | 28117 | 28135 | 50.6 | 52.6 | 5389 | 28505 | 28487 | 50.2 | 47.4 | 0.4 | 389 | 79.5 | 51.9 | 40 | 55.8 |
| 1870 | 2890 | 8866 | 8885 | 51.1 | 45 | 5390 | 9109 | 9087 | 50.5 | 43.5 | 0.6 | 244 | 73.9 | 41 | 40 | 52 |
| 1871 | 2891 | 9055 | 9079 | 52.8 | 40 | 5391 | 9724 | 9706 | 51.3 | 52.6 | 1.5 | 670 | 75.4 | 40.3 | 40 | 53.3 |
| 1872 | 2892 | 3403 | 3423 | 54.1 | 47.6 | 5392 | 3502 | 3478 | 55.8 | 48 | 1.7 | 100 | 71.6 | 45 | 40 | 51.5 |
| 1873 | 2893 | 28855 | 28874 | 52.9 | 50 | 5393 | 29306 | 29288 | 53.5 | 52.6 | 0.6 | 452 | 77.1 | 45.6 | 40 | 54.9 |
| 1874 | 2894 | 24173 | 24194 | 52.5 | 40.9 | 5394 | 24815 | 24792 | 53.4 | 41.7 | 0.9 | 643 | 75.8 | 41.2 | 40 | 53.9 |
| 1875 | 2895 | 3094 | 3113 | 50 | 50 | 5395 | 3647 | 3628 | 50.6 | 45 | 0.6 | 554 | 76.2 | 42.8 | 40 | 53.5 |
| 1876 | 2896 | 24174 | 24194 | 50.9 | 42.9 | 5396 | 24807 | 24786 | 51.7 | 45.5 | 0.8 | 634 | 75.8 | 41.3 | 40 | 53.4 |
| 1877 | 2897 | 28856 | 28875 | 52.2 | 50 | 5397 | 29306 | 29288 | 53.5 | 52.6 | 1.3 | 451 | 77.1 | 45.7 | 40 | 54.7 |
| 1878 | 2898 | 24174 | 24194 | 50.9 | 42.9 | 5398 | 24818 | 24797 | 51.6 | 40.9 | 0.7 | 645 | 75.8 | 41.2 | 40 | 53.4 |
| 1879 | 2899 | 28857 | 28876 | 51.7 | 45 | 5399 | 29306 | 29288 | 53.5 | 52.6 | 1.8 | 450 | 77.1 | 45.6 | 40 | 54.6 |
| 1880 | 2900 | 8858 | 8877 | 51.2 | 45 | 5400 | 9254 | 9236 | 50.6 | 47.4 | 0.6 | 397 | 75 | 41.1 | 40 | 52.8 |
| 1881 | 2901 | 16553 | 16571 | 53.4 | 52.6 | 5401 | 16777 | 16758 | 51.5 | 50 | 1.9 | 225 | 73.7 | 40.9 | 40 | 52.1 |
| 1882 | 2902 | 29197 | 29219 | 54.8 | 47.8 | 5402 | 29301 | 29282 | 55.3 | 55 | 0.5 | 105 | 73.4 | 48.6 | 40 | 52.9 |
| 1883 | 2903 | 29198 | 29219 | 52.6 | 45.5 | 5403 | 29306 | 29288 | 53.5 | 52.6 | 0.9 | 109 | 73.3 | 47.7 | 40 | 52.2 |
| 1884 | 2904 | 28857 | 28877 | 52.3 | 42.9 | 5404 | 29306 | 29288 | 53.5 | 52.6 | 1.2 | 450 | 77.1 | 45.6 | 40 | 54.8 |
| 1885 | 2905 | 29199 | 29219 | 51.2 | 42.9 | 5405 | 29298 | 29280 | 51.4 | 52.6 | 0.2 | 100 | 72.4 | 47 | 40 | 51.1 |
| 1886 | 2906 | 3094 | 3113 | 50 | 50 | 5406 | 3646 | 3625 | 52 | 40.9 | 2 | 553 | 76.2 | 42.7 | 40 | 53.4 |
| 1887 | 2907 | 3224 | 3243 | 52.3 | 50 | 5407 | 3650 | 3631 | 53.1 | 50 | 0.8 | 427 | 75.5 | 41.9 | 40 | 53.7 |
| 1888 | 2908 | 29195 | 29216 | 53.8 | 45.5 | 5408 | 29306 | 29287 | 54.6 | 55 | 0.8 | 112 | 73.6 | 48.2 | 40 | 52.8 |
| 1889 | 2909 | 28867 | 28885 | 51.5 | 52.6 | 5409 | 29358 | 29339 | 52.8 | 50 | 1.4 | 492 | 76.9 | 44.9 | 40 | 54.4 |
| 1890 | 2910 | 29196 | 29216 | 52.5 | 47.6 | 5410 | 29298 | 29279 | 52.6 | 55 | 0.1 | 103 | 73.3 | 48.5 | 40 | 52.1 |
| 1891 | 2911 | 28867 | 28886 | 53.2 | 50 | 5411 | 29415 | 29395 | 53.4 | 52.4 | 0.2 | 549 | 77.1 | 45 | 40 | 55 |
| 1892 | 2912 | 3093 | 3113 | 51.7 | 47.6 | 5412 | 3650 | 3631 | 53.1 | 50 | 1.4 | 558 | 76.3 | 42.8 | 40 | 54 |
| 1893 | 2913 | 3225 | 3243 | 50.9 | 52.6 | 5413 | 3646 | 3625 | 52 | 40.9 | 1.2 | 422 | 75.4 | 41.7 | 40 | 53.1 |
| 1894 | 2914 | 3225 | 3243 | 50.9 | 52.6 | 5414 | 3647 | 3628 | 50.6 | 45 | 0.3 | 423 | 75.5 | 41.8 | 40 | 53.1 |
| 1895 | 2915 | 28867 | 28886 | 53.2 | 50 | 5415 | 29306 | 29287 | 54.6 | 55 | 1.4 | 440 | 76.9 | 45.2 | 40 | 54.9 |
| 1896 | 2916 | 3223 | 3241 | 50.2 | 52.6 | 5416 | 3500 | 3481 | 51.2 | 50 | 1 | 278 | 74.7 | 42.1 | 40 | 52.5 |
| 1897 | 2917 | 28867 | 28886 | 53.2 | 50 | 5417 | 29298 | 29279 | 52.6 | 55 | 0.5 | 432 | 76.8 | 45.1 | 40 | 54.7 |
| 1898 | 2918 | 24034 | 24053 | 53.4 | 55 | 5418 | 24815 | 24791 | 54.5 | 40 | 1.1 | 782 | 76.3 | 42.1 | 40 | 54.5 |
| 1899 | 2919 | 3221 | 3239 | 51.5 | 52.6 | 5419 | 3650 | 3631 | 53.1 | 50 | 1.6 | 430 | 75.5 | 41.9 | 40 | 53.4 |
| 1900 | 2920 | 18080 | 18099 | 53 | 50 | 5420 | 18696 | 18673 | 53.4 | 41.7 | 0.5 | 617 | 76.2 | 42.5 | 40 | 54.3 |
| 1901 | 2921 | 3095 | 3116 | 51.9 | 45.5 | 5421 | 3650 | 3631 | 53.1 | 50 | 1.2 | 556 | 76.2 | 42.8 | 40 | 54 |
| 1902 | 2922 | 18080 | 18099 | 53 | 50 | 5422 | 18696 | 18672 | 53.9 | 40 | 1 | 617 | 76.2 | 42.5 | 40 | 54.3 |
| 1903 | 2923 | 28868 | 28887 | 50.7 | 45 | 5423 | 29298 | 29279 | 52.6 | 55 | 1.9 | 431 | 76.8 | 45 | 40 | 54.1 |
| 1904 | 2924 | 3218 | 3238 | 52.1 | 47.6 | 5424 | 3650 | 3631 | 53.1 | 50 | 1 | 433 | 75.5 | 41.8 | 40 | 53.6 |
| 1905 | 2925 | 8867 | 8886 | 50.7 | 50 | 5425 | 9252 | 9234 | 51.4 | 52.6 | 0.8 | 386 | 75.1 | 41.5 | 40 | 52.9 |
| 1906 | 2926 | 28867 | 28887 | 53.7 | 47.6 | 5426 | 29306 | 29287 | 54.6 | 55 | 0.8 | 440 | 76.9 | 45.2 | 40 | 55.1 |
| 1907 | 2927 | 3218 | 3237 | 50.5 | 45 | 5427 | 3497 | 3478 | 51.3 | 50 | 0.8 | 280 | 74.6 | 41.8 | 40 | 52.5 |
| 1908 | 2928 | 29195 | 29215 | 53.2 | 47.6 | 5428 | 29306 | 29287 | 54.6 | 55 | 1.4 | 112 | 73.6 | 48.2 | 40 | 52.6 |
| 1909 | 2929 | 29196 | 29215 | 51.8 | 50 | 5429 | 29298 | 29279 | 52.6 | 55 | 0.8 | 103 | 73.3 | 48.5 | 40 | 51.9 |
| 1910 | 2930 | 3218 | 3237 | 50.5 | 45 | 5430 | 3500 | 3481 | 51.2 | 50 | 0.6 | 283 | 74.6 | 41.7 | 40 | 52.5 |
| 1911 | 2931 | 8867 | 8886 | 50.7 | 50 | 5431 | 9245 | 9226 | 50 | 45 | 0.6 | 379 | 75 | 41.2 | 40 | 52.6 |
| 1912 | 2932 | 28868 | 28888 | 51.4 | 42.9 | 5432 | 29298 | 29279 | 52.6 | 55 | 1.2 | 431 | 76.8 | 45 | 40 | 54.3 |
| 1913 | 2933 | 8867 | 8886 | 50.7 | 50 | 5433 | 9107 | 9086 | 51.6 | 45.5 | 0.9 | 241 | 74.1 | 41.5 | 40 | 52.2 |
| 1914 | 2934 | 28867 | 28888 | 54.3 | 45.5 | 5434 | 29306 | 29287 | 54.6 | 55 | 0.3 | 440 | 76.9 | 45.2 | 40 | 55.2 |
| 1915 | 2935 | 19906 | 19925 | 50.1 | 50 | 5435 | 20615 | 20597 | 50.6 | 47.4 | 0.5 | 710 | 75.5 | 40.3 | 40 | 53 |
| 1916 | 2936 | 16551 | 16568 | 51.1 | 50 | 5436 | 16775 | 16756 | 50.3 | 45 | 0.8 | 225 | 73.8 | 41.3 | 40 | 51.9 |
| 1917 | 2937 | 8861 | 8880 | 50.2 | 45 | 5437 | 9341 | 9322 | 51.1 | 50 | 0.9 | 481 | 75.5 | 41.6 | 40 | 53 |
| 1918 | 2938 | 16368 | 16387 | 50.2 | 45 | 5438 | 16781 | 16761 | 51.3 | 47.6 | 1 | 414 | 75 | 40.8 | 40 | 52.7 |
| 1919 | 2939 | 3055 | 3074 | 51.1 | 50 | 5439 | 3209 | 3189 | 50.5 | 47.6 | 0.6 | 155 | 74.1 | 45.2 | 40 | 52.1 |
| 1920 | 2940 | 3217 | 3236 | 51.1 | 50 | 5440 | 3650 | 3631 | 53.1 | 50 | 2 | 434 | 75.5 | 41.9 | 40 | 53.3 |
| 1921 | 2941 | 28868 | 28889 | 52 | 40.9 | 5441 | 29298 | 29279 | 52.6 | 55 | 0.6 | 431 | 76.8 | 45 | 40 | 54.5 |
| 1922 | 2942 | 28867 | 28889 | 54.8 | 43.5 | 5442 | 29306 | 29287 | 54.6 | 55 | 0.2 | 440 | 76.9 | 45.2 | 40 | 55.3 |
| 1923 | 2943 | 3404 | 3422 | 50.5 | 47.4 | 5443 | 3503 | 3484 | 51.5 | 50 | 0.9 | 100 | 71.6 | 45 | 40 | 50.4 |
| 1924 | 2944 | 16368 | 16387 | 50.2 | 45 | 5444 | 16777 | 16758 | 51.5 | 50 | 1.2 | 410 | 75 | 40.7 | 40 | 52.6 |
| 1925 | 2945 | 24029 | 24047 | 52.1 | 52.6 | 5445 | 24815 | 24792 | 53.4 | 41.7 | 1.3 | 787 | 76.3 | 42.1 | 40 | 54.1 |
| 1926 | 2946 | 16368 | 16387 | 50.2 | 45 | 5446 | 16711 | 16691 | 51 | 42.9 | 0.8 | 344 | 75.1 | 41.9 | 40 | 52.7 |
| 1927 | 2947 | 28867 | 28890 | 55.2 | 41.7 | 5447 | 29306 | 29287 | 54.6 | 55 | 0.6 | 440 | 76.9 | 45.2 | 40 | 55.3 |
| 1928 | 2948 | 29196 | 29214 | 51.1 | 52.6 | 5448 | 29298 | 29279 | 52.6 | 55 | 1.5 | 103 | 73.3 | 48.5 | 40 | 51.7 |
| 1929 | 2949 | 18488 | 18507 | 53.7 | 55 | 5449 | 19224 | 19200 | 52.4 | 40 | 1.3 | 737 | 76 | 41.5 | 40 | 54 |
| 1930 | 2950 | 28395 | 28413 | 50.2 | 42.1 | 5450 | 28506 | 28488 | 50.2 | 47.4 | 0 | 112 | 74.4 | 50 | 40 | 52.2 |
| 1931 | 2951 | 16551 | 16568 | 51.1 | 50 | 5451 | 17032 | 17011 | 52 | 45.5 | 0.9 | 482 | 75.8 | 42.1 | 40 | 53.5 |
| 1932 | 2952 | 28871 | 28891 | 50.9 | 42.9 | 5452 | 29358 | 29339 | 52.8 | 50 | 1.9 | 488 | 76.9 | 44.9 | 40 | 54.2 |
| 1933 | 2953 | 28871 | 28891 | 50.9 | 42.9 | 5453 | 29298 | 29280 | 51.4 | 52.6 | 0.5 | 428 | 76.8 | 45.1 | 40 | 54.2 |
| 1934 | 2954 | 28870 | 28891 | 52.2 | 40.9 | 5454 | 29306 | 29288 | 53.5 | 52.6 | 1.2 | 437 | 76.8 | 45.1 | 40 | 54.6 |
| 1935 | 2955 | 28868 | 28891 | 53.8 | 41.7 | 5455 | 29301 | 29282 | 55.3 | 55 | 1.5 | 434 | 76.9 | 45.2 | 40 | 55.1 |
| 1936 | 2956 | 3404 | 3422 | 50.5 | 47.4 | 5456 | 3504 | 3485 | 50.4 | 45 | 0.1 | 101 | 71.5 | 44.6 | 40 | 50.3 |
| 1937 | 2957 | 29195 | 29213 | 51.9 | 52.6 | 5457 | 29298 | 29279 | 52.6 | 55 | 0.7 | 104 | 73.1 | 48.1 | 40 | 51.9 |
| 1938 | 2958 | 28938 | 28956 | 50.8 | 47.4 | 5458 | 29298 | 29280 | 51.4 | 52.6 | 0.6 | 361 | 76.4 | 44.9 | 40 | 53.8 |
| 1939 | 2959 | 18488 | 18507 | 53.7 | 55 | 5459 | 19210 | 19191 | 52 | 50 | 1.7 | 723 | 76 | 41.6 | 40 | 53.9 |
| 1940 | 2960 | 3095 | 3116 | 51.9 | 45.5 | 5460 | 3647 | 3628 | 50.6 | 45 | 1.3 | 553 | 76.2 | 42.7 | 40 | 53.6 |
| 1941 | 2961 | 3214 | 3233 | 51.1 | 50 | 5461 | 3497 | 3478 | 51.3 | 50 | 0.2 | 284 | 74.7 | 41.9 | 40 | 52.7 |
| 1942 | 2962 | 24017 | 24039 | 53 | 43.5 | 5462 | 24815 | 24791 | 54.5 | 40 | 1.5 | 799 | 76.2 | 41.9 | 40 | 54.4 |
| 1943 | 2963 | 3095 | 3116 | 51.9 | 45.5 | 5463 | 3646 | 3625 | 52 | 40.9 | 0.1 | 552 | 76.1 | 42.6 | 40 | 54 |
| 1944 | 2964 | 18550 | 18571 | 50.4 | 40.9 | 5464 | 19215 | 19194 | 50.2 | 40.9 | 0.2 | 666 | 75.8 | 41.1 | 40 | 53.2 |
| 1945 | 2965 | 3214 | 3233 | 51.1 | 50 | 5465 | 3500 | 3481 | 51.2 | 50 | 0.1 | 287 | 74.7 | 41.8 | 40 | 52.7 |
| 1946 | 2966 | 18586 | 18603 | 50.4 | 44.4 | 5466 | 19224 | 19200 | 52.4 | 40 | 1.9 | 639 | 75.6 | 40.8 | 40 | 53.1 |
| 1947 | 2967 | 18586 | 18603 | 50.4 | 44.4 | 5467 | 19217 | 19196 | 50.2 | 40.9 | 0.2 | 632 | 75.6 | 41 | 40 | 53.1 |
| 1948 | 2968 | 18586 | 18603 | 50.4 | 44.4 | 5468 | 19215 | 19194 | 50.2 | 40.9 | 0.2 | 630 | 75.6 | 41 | 40 | 53.1 |
| 1949 | 2969 | 18590 | 18608 | 50.6 | 42.1 | 5469 | 19224 | 19200 | 52.4 | 40 | 1.8 | 635 | 75.6 | 40.9 | 40 | 53.2 |
| 1950 | 2970 | 15255 | 15273 | 50.3 | 52.6 | 5470 | 15767 | 15746 | 50.7 | 40.9 | 0.4 | 513 | 75.1 | 40.2 | 40 | 52.7 |
| 1951 | 2971 | 28942 | 28961 | 50.2 | 45 | 5471 | 29414 | 29395 | 50.5 | 50 | 0.3 | 473 | 76.8 | 44.6 | 40 | 53.9 |
| 1952 | 2972 | 18590 | 18608 | 50.6 | 42.1 | 5472 | 19217 | 19196 | 50.2 | 40.9 | 0.3 | 628 | 75.7 | 41.1 | 40 | 53.1 |
| 1953 | 2973 | 3055 | 3074 | 51.1 | 50 | 5473 | 3207 | 3187 | 50.5 | 47.6 | 0.6 | 153 | 74 | 45.1 | 40 | 52 |
| 1954 | 2974 | 18590 | 18608 | 50.6 | 42.1 | 5474 | 19215 | 19194 | 50.2 | 40.9 | 0.3 | 626 | 75.7 | 41.1 | 40 | 53.1 |
| 1955 | 2975 | 18591 | 18611 | 51.7 | 42.9 | 5475 | 19224 | 19200 | 52.4 | 40 | 0.7 | 634 | 75.7 | 41 | 40 | 53.6 |
| 1956 | 2976 | 18591 | 18611 | 51.7 | 42.9 | 5476 | 19217 | 19196 | 50.2 | 40.9 | 1.4 | 627 | 75.7 | 41.1 | 40 | 53.2 |
| 1957 | 2977 | 18591 | 18611 | 51.7 | 42.9 | 5477 | 19215 | 19194 | 50.2 | 40.9 | 1.4 | 625 | 75.7 | 41.1 | 40 | 53.2 |
| 1958 | 2978 | 28546 | 28565 | 52.2 | 50 | 5478 | 28672 | 28654 | 50.6 | 52.6 | 1.6 | 127 | 76.5 | 53.5 | 40 | 53.8 |
| 1959 | 2979 | 29191 | 29210 | 54.4 | 55 | 5479 | 29415 | 29395 | 53.4 | 52.4 | 1 | 225 | 75.7 | 45.8 | 40 | 54.1 |
| 1960 | 2980 | 7880 | 7900 | 50.3 | 42.9 | 5480 | 8190 | 8172 | 50.3 | 47.4 | 0 | 311 | 74.9 | 41.8 | 40 | 52.6 |
| 1961 | 2981 | 3167 | 3189 | 51.6 | 43.5 | 5481 | 3650 | 3631 | 53.1 | 50 | 1.5 | 484 | 75.8 | 42.1 | 40 | 53.6 |
| 1962 | 2982 | 28965 | 28984 | 52.9 | 55 | 5482 | 29306 | 29288 | 53.5 | 52.6 | 0.6 | 342 | 76.5 | 45.3 | 40 | 54.5 |
| 1963 | 2983 | 3166 | 3188 | 51.6 | 43.5 | 5483 | 3650 | 3631 | 53.1 | 50 | 1.5 | 485 | 75.8 | 42.3 | 40 | 53.7 |
| 1964 | 2984 | 8867 | 8887 | 52.3 | 47.6 | 5484 | 9101 | 9081 | 50.5 | 47.6 | 1.9 | 235 | 74.1 | 41.7 | 40 | 52.1 |
| 1965 | 2985 | 23843 | 23863 | 50.3 | 42.9 | 5485 | 24013 | 23995 | 50.3 | 47.4 | 0 | 171 | 73.7 | 43.3 | 40 | 51.8 |
| 1966 | 2986 | 3403 | 3421 | 53.1 | 52.6 | 5486 | 3503 | 3484 | 51.5 | 50 | 1.7 | 101 | 71.9 | 45.5 | 40 | 50.9 |
| 1967 | 2987 | 16549 | 16567 | 54.9 | 52.6 | 5487 | 16777 | 16756 | 53.4 | 45.5 | 1.5 | 229 | 74 | 41.5 | 40 | 52.9 |
| 1968 | 2988 | 8868 | 8889 | 50.4 | 40.9 | 5488 | 9109 | 9087 | 50.5 | 43.5 | 0.1 | 242 | 73.9 | 40.9 | 40 | 51.9 |
| 1969 | 2989 | 8861 | 8880 | 50.2 | 45 | 5489 | 9311 | 9292 | 50.7 | 50 | 0.6 | 451 | 75.3 | 41.2 | 40 | 52.9 |
| 1970 | 2990 | 8868 | 8889 | 50.4 | 40.9 | 5490 | 9257 | 9238 | 50.5 | 45 | 0.1 | 390 | 75 | 41 | 40 | 52.7 |
| 1971 | 2991 | 8868 | 8889 | 50.4 | 40.9 | 5491 | 9313 | 9294 | 50.4 | 50 | 0 | 446 | 75.4 | 41.5 | 40 | 53 |
| 1972 | 2992 | 23841 | 23859 | 50.5 | 52.6 | 5492 | 24013 | 23995 | 50.3 | 47.4 | 0.1 | 173 | 74 | 43.9 | 40 | 52 |
| 1973 | 2993 | 28548 | 28568 | 50.5 | 42.9 | 5493 | 28672 | 28654 | 50.6 | 52.6 | 0 | 125 | 76.2 | 52.8 | 40 | 53.6 |
| 1974 | 2994 | 8867 | 8888 | 52.7 | 45.5 | 5494 | 9310 | 9291 | 51.2 | 45 | 1.5 | 444 | 75.4 | 41.4 | 40 | 53.2 |
| 1975 | 2995 | 28968 | 28988 | 50.9 | 47.6 | 5495 | 29298 | 29279 | 52.6 | 55 | 1.8 | 331 | 76.2 | 44.7 | 40 | 53.7 |
| 1976 | 2996 | 19907 | 19926 | 52.1 | 55 | 5496 | 20615 | 20597 | 50.6 | 47.4 | 1.6 | 709 | 75.5 | 40.3 | 40 | 53.1 |
| 1977 | 2997 | 8861 | 8880 | 50.2 | 45 | 5497 | 9252 | 9235 | 50.1 | 50 | 0.1 | 392 | 75 | 41.1 | 40 | 52.6 |
| 1978 | 2998 | 19909 | 19929 | 50.7 | 52.4 | 5498 | 20615 | 20597 | 50.6 | 47.4 | 0.2 | 707 | 75.5 | 40.3 | 40 | 53.1 |
| 1979 | 2999 | 3361 | 3382 | 51.9 | 45.5 | 5499 | 3500 | 3481 | 51.2 | 50 | 0.7 | 140 | 74.1 | 46.4 | 40 | 52.3 |
| 1980 | 3000 | 18696 | 18715 | 51.7 | 50 | 5500 | 18881 | 18862 | 50.2 | 45 | 1.5 | 186 | 74.1 | 43.5 | 40 | 52.1 |
| 1981 | 3001 | 28968 | 28989 | 51.5 | 45.5 | 5501 | 29298 | 29279 | 52.6 | 55 | 1.1 | 331 | 76.2 | 44.7 | 40 | 53.9 |
| 1982 | 3002 | 19709 | 19730 | 51.3 | 40.9 | 5502 | 19923 | 19903 | 50.9 | 47.6 | 0.4 | 215 | 73.9 | 41.9 | 40 | 52.1 |
| 1983 | 3003 | 3361 | 3382 | 51.9 | 45.5 | 5503 | 3497 | 3478 | 51.3 | 50 | 0.6 | 137 | 74.1 | 46.7 | 40 | 52.4 |
| 1984 | 3004 | 3361 | 3384 | 53.7 | 41.7 | 5504 | 3495 | 3473 | 51.8 | 43.5 | 1.9 | 135 | 74 | 46.7 | 40 | 52.5 |
| 1985 | 3005 | 19709 | 19730 | 51.3 | 40.9 | 5505 | 19924 | 19905 | 50.1 | 50 | 1.2 | 216 | 73.9 | 41.7 | 40 | 51.8 |
| 1986 | 3006 | 16378 | 16397 | 50.4 | 45 | 5506 | 16711 | 16691 | 51 | 42.9 | 0.6 | 334 | 75.2 | 42.2 | 40 | 52.9 |
| 1987 | 3007 | 3361 | 3382 | 51.9 | 45.5 | 5507 | 3504 | 3485 | 50.4 | 45 | 1.5 | 144 | 74.3 | 46.5 | 40 | 52.2 |
| 1988 | 3008 | 18704 | 18724 | 50.8 | 47.6 | 5508 | 19406 | 19388 | 50.6 | 47.4 | 0.1 | 703 | 75.4 | 40.3 | 40 | 53.1 |
| 1989 | 3009 | 8868 | 8889 | 50.4 | 40.9 | 5509 | 9314 | 9295 | 51.1 | 50 | 0.7 | 447 | 75.5 | 41.6 | 40 | 53 |
| 1990 | 3010 | 3361 | 3382 | 51.9 | 45.5 | 5510 | 3503 | 3484 | 51.5 | 50 | 0.5 | 143 | 74.4 | 46.9 | 40 | 52.6 |
| 1991 | 3011 | 19709 | 19730 | 51.3 | 40.9 | 5511 | 19931 | 19912 | 50.9 | 55 | 0.4 | 223 | 74.2 | 42.2 | 40 | 52.3 |
| 1992 | 3012 | 16548 | 16566 | 54.9 | 52.6 | 5512 | 16777 | 16756 | 53.4 | 45.5 | 1.5 | 230 | 73.9 | 41.3 | 40 | 52.9 |
| 1993 | 3013 | 8868 | 8889 | 50.4 | 40.9 | 5513 | 9315 | 9296 | 50 | 45 | 0.4 | 448 | 75.4 | 41.5 | 40 | 52.9 |
| 1994 | 3014 | 22321 | 22341 | 51.6 | 42.9 | 5514 | 22460 | 22441 | 50.7 | 45 | 0.9 | 140 | 71.5 | 40 | 40 | 50.3 |
| 1995 | 3015 | 29182 | 29202 | 51.2 | 42.9 | 5515 | 29412 | 29393 | 50.3 | 45 | 0.9 | 231 | 75.4 | 45 | 40 | 53 |
| 1996 | 3016 | 22173 | 22193 | 51 | 42.9 | 5516 | 22460 | 22441 | 50.7 | 45 | 0.3 | 288 | 74.1 | 40.3 | 40 | 52.1 |
| 1997 | 3017 | 29181 | 29201 | 52.4 | 47.6 | 5517 | 29413 | 29393 | 51.1 | 42.9 | 1.3 | 233 | 75.5 | 45.1 | 40 | 53.3 |
| 1998 | 3018 | 18704 | 18724 | 50.8 | 47.6 | 5518 | 18881 | 18862 | 50.2 | 45 | 0.5 | 178 | 73.8 | 43.3 | 40 | 51.9 |
| 1999 | 3019 | 20751 | 20771 | 51.3 | 47.6 | 5519 | 21301 | 21278 | 51.3 | 41.7 | 0 | 551 | 75.5 | 41 | 40 | 53.3 |
| 2000 | 3020 | 29181 | 29200 | 50 | 45 | 5520 | 29412 | 29393 | 50.3 | 45 | 0.3 | 232 | 75.5 | 45.3 | 40 | 53 |
| 2001 | 3021 | 20751 | 20771 | 51.3 | 47.6 | 5521 | 21304 | 21283 | 50.5 | 40.9 | 0.8 | 554 | 75.5 | 41 | 40 | 53.1 |
| 2002 | 3022 | 29173 | 29197 | 54.2 | 40 | 5522 | 29415 | 29395 | 53.4 | 52.4 | 0.8 | 243 | 75.7 | 45.3 | 40 | 54.1 |
| 2003 | 3023 | 8867 | 8888 | 52.7 | 45.5 | 5523 | 9247 | 9226 | 52 | 45.5 | 0.7 | 381 | 75 | 41.2 | 40 | 53.2 |
| 2004 | 3024 | 8867 | 8888 | 52.7 | 45.5 | 5524 | 9255 | 9236 | 51.1 | 45 | 1.6 | 389 | 75 | 41.1 | 40 | 52.9 |
| 2005 | 3025 | 29178 | 29198 | 51.4 | 42.9 | 5525 | 29412 | 29393 | 50.3 | 45 | 1.1 | 235 | 75.5 | 45.1 | 40 | 53.1 |
| 2006 | 3026 | 3163 | 3185 | 53.6 | 47.8 | 5526 | 3650 | 3631 | 53.1 | 50 | 0.5 | 488 | 75.9 | 42.4 | 40 | 54.2 |
| 2007 | 3027 | 19800 | 19817 | 50.4 | 50 | 5527 | 20033 | 20016 | 50.4 | 50 | 0 | 234 | 74.9 | 43.6 | 41 | 52.7 |
| 2008 | 3028 | 8867 | 8886 | 50.7 | 50 | 5528 | 9376 | 9355 | 51 | 40.9 | 0.3 | 510 | 75.7 | 41.8 | 41 | 53.3 |
| 2009 | 3029 | 19800 | 19817 | 50.4 | 50 | 5529 | 19930 | 19910 | 50.6 | 47.6 | 0.2 | 131 | 72.6 | 43.5 | 41 | 51 |
| 2010 | 3030 | 24418 | 24439 | 52.9 | 45.5 | 5530 | 25082 | 25064 | 51.1 | 52.6 | 1.8 | 665 | 75.8 | 41.2 | 41 | 53.5 |
| 2011 | 3031 | 25771 | 25790 | 51.1 | 45 | 5531 | 26182 | 26161 | 51.2 | 40.9 | 0.1 | 412 | 74.8 | 40.3 | 41 | 52.8 |
| 2012 | 3032 | 12976 | 12994 | 50.3 | 47.4 | 5532 | 13326 | 13306 | 50.7 | 42.9 | 0.3 | 351 | 76.1 | 44.2 | 41 | 53.5 |
| 2013 | 3033 | 12976 | 12994 | 50.3 | 47.4 | 5533 | 13328 | 13307 | 51.2 | 45.5 | 0.9 | 353 | 76.1 | 44.2 | 41 | 53.5 |
| 2014 | 3034 | 2823 | 2844 | 50.4 | 45.5 | 5534 | 3500 | 3481 | 51.2 | 50 | 0.7 | 678 | 76.3 | 42.5 | 41 | 53.7 |
| 2015 | 3035 | 18009 | 18028 | 51.6 | 55 | 5535 | 18223 | 18205 | 53.3 | 52.6 | 1.7 | 215 | 74.5 | 43.3 | 41 | 52.7 |
| 2016 | 3036 | 8223 | 8240 | 50.4 | 50 | 5536 | 8933 | 8916 | 52.2 | 50 | 1.8 | 711 | 75.4 | 40.1 | 41 | 53 |
| 2017 | 3037 | 29180 | 29199 | 50.1 | 40 | 5537 | 29414 | 29395 | 50.5 | 50 | 0.4 | 235 | 75.5 | 45.1 | 41 | 53 |
| 2018 | 3038 | 19800 | 19817 | 50.4 | 50 | 5538 | 19925 | 19906 | 50.1 | 50 | 0.4 | 126 | 72.4 | 43.7 | 41 | 50.8 |
| 2019 | 3039 | 25772 | 25793 | 52.4 | 40.9 | 5539 | 26183 | 26162 | 52.8 | 45.5 | 0.4 | 412 | 74.8 | 40.3 | 41 | 53.2 |
| 2020 | 3040 | 14951 | 14975 | 52.2 | 40 | 5540 | 15152 | 15135 | 51.4 | 50 | 0.8 | 202 | 73.4 | 41.1 | 41 | 51.9 |
| 2021 | 3041 | 2823 | 2844 | 50.4 | 45.5 | 5541 | 3503 | 3484 | 51.5 | 50 | 1 | 681 | 76.4 | 42.6 | 41 | 53.7 |
| 2022 | 3042 | 18075 | 18095 | 50.6 | 47.6 | 5542 | 18231 | 18210 | 52.2 | 45.5 | 1.6 | 157 | 73.6 | 43.9 | 41 | 51.8 |
| 2023 | 3043 | 5 | 23 | 51.3 | 52.6 | 5543 | 269 | 251 | 51.1 | 52.6 | 0.1 | 265 | 76.4 | 46.4 | 41 | 53.9 |
| 2024 | 3044 | 9140 | 9159 | 50.1 | 45 | 5544 | 9249 | 9231 | 50.8 | 47.4 | 0.7 | 110 | 71.3 | 42.7 | 41 | 50 |
| 2025 | 3045 | 24418 | 24439 | 52.9 | 45.5 | 5545 | 24815 | 24791 | 54.5 | 40 | 1.6 | 398 | 75.9 | 43.2 | 41 | 54.1 |
| 2026 | 3046 | 8794 | 8813 | 51.6 | 45 | 5546 | 9358 | 9338 | 51 | 42.9 | 0.6 | 565 | 75.8 | 41.8 | 41 | 53.5 |
| 2027 | 3047 | 24418 | 24439 | 52.9 | 45.5 | 5547 | 24807 | 24786 | 51.7 | 45.5 | 1.2 | 390 | 75.9 | 43.3 | 41 | 53.8 |
| 2028 | 3048 | 2387 | 2405 | 51.6 | 52.6 | 5548 | 3186 | 3165 | 50.4 | 40.9 | 1.2 | 800 | 76.9 | 43.5 | 41 | 54.1 |
| 2029 | 3049 | 24418 | 24439 | 52.9 | 45.5 | 5549 | 24527 | 24506 | 51.7 | 40.9 | 1.2 | 110 | 71.3 | 42.7 | 41 | 50.5 |
| 2030 | 3050 | 24418 | 24439 | 52.9 | 45.5 | 5550 | 24517 | 24494 | 53.2 | 41.7 | 0.3 | 100 | 70.8 | 43 | 41 | 50.5 |
| 2031 | 3051 | 4255 | 4276 | 51.7 | 45.5 | 5551 | 4836 | 4817 | 51.2 | 45 | 0.5 | 582 | 75.9 | 41.9 | 41 | 53.6 |
| 2032 | 3052 | 24420 | 24440 | 50.8 | 42.9 | 5552 | 25082 | 25064 | 51.1 | 52.6 | 0.3 | 663 | 75.7 | 41 | 41 | 53.3 |
| 2033 | 3053 | 8867 | 8887 | 52.3 | 47.6 | 5553 | 9250 | 9232 | 51.6 | 47.4 | 0.8 | 384 | 75.1 | 41.4 | 41 | 53.2 |
| 2034 | 3054 | 14951 | 14975 | 52.2 | 40 | 5554 | 15275 | 15257 | 50.8 | 52.6 | 1.3 | 325 | 74.6 | 40.9 | 41 | 52.6 |
| 2035 | 3055 | 2387 | 2405 | 51.6 | 52.6 | 5555 | 3185 | 3164 | 51 | 45.5 | 0.7 | 799 | 76.9 | 43.6 | 41 | 54.2 |
| 2036 | 3056 | 8865 | 8884 | 50.4 | 45 | 5556 | 9252 | 9235 | 50.1 | 50 | 0.3 | 388 | 75.1 | 41.2 | 41 | 52.7 |
| 2037 | 3057 | 24420 | 24440 | 50.8 | 42.9 | 5557 | 24818 | 24797 | 51.6 | 40.9 | 0.8 | 399 | 75.8 | 42.9 | 41 | 53.4 |
| 2038 | 3058 | 24420 | 24440 | 50.8 | 42.9 | 5558 | 24807 | 24786 | 51.7 | 45.5 | 0.9 | 388 | 75.8 | 43 | 41 | 53.4 |
| 2039 | 3059 | 11541 | 11560 | 50.1 | 45 | 5559 | 12110 | 12090 | 51.1 | 42.9 | 1 | 570 | 75.9 | 41.9 | 41 | 53.3 |
| 2040 | 3060 | 2387 | 2405 | 51.6 | 52.6 | 5560 | 2672 | 2653 | 51.6 | 50 | 0 | 286 | 77 | 47.6 | 41 | 54.5 |
| 2041 | 3061 | 24420 | 24440 | 50.8 | 42.9 | 5561 | 24526 | 24506 | 50.3 | 42.9 | 0.5 | 107 | 70.8 | 42.1 | 41 | 49.8 |
| 2042 | 3062 | 11540 | 11557 | 50.4 | 50 | 5562 | 12110 | 12090 | 51.1 | 42.9 | 0.7 | 571 | 76 | 42 | 41 | 53.4 |
| 2043 | 3063 | 6263 | 6282 | 50.9 | 45 | 5563 | 6483 | 8463 | 50.2 | 42.9 | 0.7 | 221 | 73.7 | 41.2 | 41 | 51.8 |
| 2044 | 3064 | 24418 | 24440 | 55 | 47.8 | 5564 | 24815 | 24791 | 54.5 | 40 | 0.5 | 398 | 75.9 | 43.2 | 41 | 54.6 |
| 2045 | 3065 | 18075 | 118095 | 50.6 | 47.6 | 5565 | 18233 | 18214 | 52 | 50 | 1.4 | 159 | 74 | 44.7 | 41 | 52.1 |
| 2046 | 3066 | 18075 | 18095 | 50.6 | 47.6 | 5566 | 18233 | 18215 | 51.3 | 52.6 | 0.7 | 159 | 74 | 44.7 | 41 | 52.1 |
| 2047 | 3067 | 2429 | 2447 | 50.2 | 47.4 | 5567 | 3055 | 3036 | 50.6 | 50 | 0.4 | 627 | 76.3 | 42.6 | 41 | 53.6 |
| 2048 | 3068 | 19800 | 19818 | 52.1 | 52.6 | 5568 | 19917 | 19896 | 50.9 | 45.5 | 1.2 | 118 | 71.9 | 43.2 | 41 | 50.7 |
| 2049 | 3069 | 24481 | 24500 | 50.1 | 45 | 5569 | 24936 | 24919 | 51.8 | 50 | 1.7 | 456 | 75.7 | 42.1 | 41 | 53.1 |
| 2050 | 3070 | 276 | 294 | 50.5 | 47.4 | 5570 | 713 | 695 | 50.7 | 47.4 | 0.2 | 438 | 79.1 | 50.7 | 41 | 55.7 |
| 2051 | 3071 | 19801 | 19819 | 53.2 | 52.6 | 5571 | 19927 | 19908 | 52.1 | 55 | 1.1 | 127 | 72.7 | 44.1 | 41 | 51.6 |
| 2052 | 3072 | 19801 | 19819 | 53.2 | 52.6 | 5572 | 19925 | 19905 | 51.4 | 52.4 | 1.9 | 125 | 72.5 | 44 | 41 | 51.3 |
| 2053 | 3073 | 3800 | 3824 | 53.6 | 40 | 5573 | 4318 | 4294 | 54.4 | 40 | 0.8 | 519 | 75.3 | 40.8 | 41 | 53.9 |
| 2054 | 3074 | 11540 | 11557 | 50.4 | 50 | 5574 | 12258 | 12238 | 50.3 | 42.9 | 0.2 | 719 | 76.2 | 42 | 41 | 53.5 |
| 2055 | 3075 | 24482 | 24502 | 50.3 | 42.9 | 5575 | 24938 | 24921 | 50.4 | 50 | 0.1 | 457 | 75.6 | 41.8 | 41 | 53.1 |
| 2056 | 3076 | 24482 | 24502 | 50.3 | 42.9 | 5576 | 24807 | 24786 | 51.7 | 45.5 | 1.4 | 326 | 75.4 | 42.9 | 41 | 53 |
| 2057 | 3077 | 8867 | 8888 | 52.7 | 45.5 | 5577 | 9364 | 9346 | 53.9 | 52.6 | 1.2 | 498 | 75.8 | 42.2 | 41 | 54 |
| 2058 | 3078 | 24481 | 24502 | 51.5 | 45.5 | 5578 | 25080 | 25062 | 53.5 | 52.6 | 2 | 600 | 75.5 | 40.8 | 41 | 53.4 |
| 2059 | 3079 | 8865 | 8884 | 50.4 | 45 | 5579 | 9107 | 9086 | 51.6 | 45.5 | 1.2 | 243 | 74 | 41.2 | 41 | 52 |
| 2060 | 3080 | 8867 | 8888 | 52.7 | 45.5 | 5580 | 9313 | 9293 | 52.1 | 47.6 | 0.6 | 447 | 75.5 | 41.6 | 41 | 53.5 |
| 2061 | 3081 | 2427 | 2445 | 52.1 | 52.6 | 5581 | 3055 | 3036 | 50.6 | 50 | 1.5 | 629 | 76.4 | 42.8 | 41 | 53.7 |
| 2062 | 3082 | 2823 | 2844 | 50.4 | 45.5 | 5582 | 3504 | 3485 | 50.4 | 45 | 0.1 | 682 | 76.3 | 42.5 | 41 | 53.7 |
| 2063 | 3083 | 24483 | 24503 | 51 | 42.9 | 5583 | 25085 | 25068 | 50.3 | 50 | 0.6 | 603 | 75.4 | 40.6 | 41 | 53 |
| 2064 | 3084 | 15255 | 15273 | 50.3 | 52.6 | 5584 | 15649 | 15632 | 50.1 | 50 | 0.2 | 395 | 75.1 | 41.3 | 41 | 52.7 |
| 2065 | 3085 | 24483 | 24503 | 51 | 42.9 | 5585 | 25082 | 25064 | 51.1 | 52.6 | 0.1 | 600 | 75.5 | 40.8 | 41 | 53.3 |
| 2066 | 3086 | 8867 | 8886 | 50.7 | 50 | 5586 | 9375 | 9354 | 50.4 | 40.9 | 0.3 | 509 | 75.7 | 41.8 | 41 | 53.2 |
| 2067 | 3087 | 12976 | 12994 | 50.3 | 47.4 | 5587 | 13329 | 13308 | 50.5 | 40.9 | 0.2 | 354 | 76.1 | 44.1 | 41 | 53.4 |
| 2068 | 3088 | 24483 | 24503 | 51 | 42.9 | 5588 | 25081 | 25063 | 52.4 | 52.6 | 1.4 | 599 | 75.5 | 40.7 | 41 | 53.2 |
| 2069 | 3089 | 379 | 398 | 50.1 | 45 | 5589 | 941 | 922 | 50.5 | 50 | 0.4 | 563 | 78.7 | 48.8 | 41 | 55.2 |
| 2070 | 3090 | 24483 | 24503 | 51 | 42.9 | 5590 | 24936 | 24919 | 51.8 | 50 | 0.8 | 454 | 75.7 | 42.1 | 41 | 53.4 |
| 2071 | 3091 | 19802 | 19820 | 53 | 52.6 | 5591 | 19927 | 19908 | 52.1 | 55 | 0.8 | 126 | 72.8 | 44.4 | 41 | 51.7 |
| 2072 | 3092 | 9934 | 9953 | 50.7 | 50 | 5592 | 10670 | 10649 | 51.3 | 40.9 | 0.6 | 737 | 75.7 | 40.8 | 41 | 53.3 |
| 2073 | 3093 | 8866 | 8885 | 51.1 | 45 | 5593 | 9312 | 9293 | 50.6 | 45 | 0.5 | 447 | 75.4 | 41.4 | 41 | 53 |
| 2074 | 3094 | 19846 | 19866 | 51.2 | 42.9 | 5594 | 20033 | 20016 | 50.4 | 50 | 0.8 | 188 | 74.2 | 43.6 | 41 | 52.2 |
| 2075 | 3095 | 19848 | 19867 | 50.7 | 45 | 5595 | 20033 | 20016 | 50.4 | 50 | 0.3 | 186 | 74.1 | 43.5 | 41 | 52.1 |
| 2076 | 3096 | 9538 | 9558 | 50.9 | 42.9 | 5596 | 10017 | 9999 | 52.8 | 52.6 | 1.9 | 480 | 75.5 | 41.5 | 41 | 53.2 |
| 2077 | 3097 | 8220 | 8238 | 51.5 | 47.4 | 5597 | 8933 | 8916 | 52.2 | 50 | 0.7 | 714 | 75.4 | 40.1 | 41 | 53.3 |
| 2078 | 3098 | 9140 | 9159 | 50.1 | 45 | 5598 | 9249 | 9232 | 50 | 50 | 0.1 | 110 | 71.3 | 42.7 | 41 | 50 |
| 2079 | 3099 | 12976 | 12994 | 50.3 | 47.4 | 5599 | 13332 | 13312 | 50.9 | 47.6 | 0.6 | 357 | 76.2 | 44.3 | 41 | 53.5 |
| 2080 | 3100 | 15752 | 15772 | 50.8 | 47.6 | 5600 | 16174 | 16154 | 50.4 | 42.9 | 0.4 | 423 | 75.1 | 40.9 | 41 | 52.8 |
| 2081 | 3101 | 18074 | 18094 | 51.1 | 42.9 | 5601 | 18232 | 18212 | 50.6 | 47.6 | 0.5 | 159 | 73.7 | 44 | 41 | 51.9 |
| 2082 | 3102 | 24559 | 24579 | 52 | 52.4 | 5602 | 25081 | 25063 | 52.4 | 52.6 | 0.4 | 523 | 75.5 | 41.1 | 41 | 53.5 |
| 2083 | 3103 | 24559 | 24579 | 52 | 52.4 | 5603 | 25079 | 25061 | 52.7 | 52.6 | 0.7 | 521 | 75.5 | 41.3 | 41 | 53.6 |
| 2084 | 3104 | 3169 | 3191 | 52.1 | 47.8 | 5604 | 3650 | 3631 | 53.1 | 50 | 1 | 482 | 75.9 | 42.3 | 41 | 53.8 |
| 2085 | 3105 | 28117 | 28135 | 50.6 | 52.6 | 5605 | 28672 | 28654 | 50.6 | 52.6 | 0.1 | 556 | 80 | 52 | 41 | 56.3 |
| 2086 | 3106 | 1809 | 1829 | 50.6 | 42.9 | 5606 | 2103 | 2082 | 52 | 45.5 | 1.5 | 295 | 75.4 | 43.4 | 41 | 53 |
| 2087 | 3107 | 24559 | 24579 | 52 | 52.4 | 5607 | 24933 | 24913 | 51.1 | 42.9 | 0.8 | 375 | 75.6 | 42.7 | 41 | 53.4 |
| 2088 | 3108 | 1809 | 1829 | 50.6 | 42.9 | 5608 | 2113 | 2094 | 50.1 | 45 | 0.4 | 305 | 75.4 | 43.3 | 41 | 52.9 |
| 2089 | 3109 | 28116 | 28134 | 50.8 | 47.4 | 5609 | 28505 | 28487 | 50.2 | 47.4 | 0.6 | 390 | 79.4 | 51.8 | 41 | 55.8 |
| 2090 | 3110 | 1808 | 1828 | 50.6 | 42.9 | 5610 | 2103 | 2082 | 52 | 45.5 | 1.5 | 296 | 75.5 | 43.6 | 41 | 53.1 |
| 2091 | 3111 | 15951 | 15975 | 53.1 | 40 | 5611 | 16210 | 16192 | 54.3 | 52.6 | 1.2 | 260 | 74.3 | 41.5 | 41 | 53.1 |
| 2092 | 3112 | 8865 | 8884 | 50.4 | 45 | 5612 | 9341 | 9322 | 51.1 | 50 | 0.7 | 477 | 75.6 | 41.7 | 41 | 53.1 |
| 2093 | 3113 | 15 | 33 | 50.7 | 52.6 | 5613 | 642 | 622 | 51.6 | 47.6 | 0.9 | 628 | 79 | 49.2 | 41 | 55.6 |
| 2094 | 3114 | 8861 | 8880 | 50.2 | 45 | 5614 | 9107 | 9086 | 51.6 | 45.5 | 1.4 | 247 | 73.9 | 40.9 | 41 | 51.9 |
| 2095 | 3115 | 1808 | 1828 | 50.6 | 42.9 | 5615 | 2113 | 2094 | 50.1 | 45 | 0.4 | 306 | 75.5 | 43.5 | 41 | 53 |
| 2096 | 3116 | 24562 | 24580 | 50.1 | 52.6 | 5616 | 24933 | 24913 | 51.1 | 42.9 | 1.1 | 372 | 75.5 | 42.5 | 41 | 53 |
| 2097 | 3117 | 28116 | 28134 | 50.8 | 47.4 | 5617 | 28672 | 28654 | 50.6 | 52.6 | 0.2 | 557 | 80 | 51.9 | 41 | 56.2 |
| 2098 | 3118 | 24560 | 24580 | 51.3 | 52.4 | 5618 | 25081 | 25063 | 52.4 | 52.6 | 1.1 | 522 | 75.4 | 41 | 41 | 53.3 |
| 2099 | 3119 | 24560 | 24580 | 51.3 | 52.4 | 5619 | 25079 | 25061 | 52.7 | 52.6 | 1.4 | 520 | 75.5 | 41.2 | 41 | 53.3 |
| 2100 | 3120 | 16366 | 16384 | 50.3 | 52.6 | 5620 | 16775 | 16755 | 51.1 | 42.9 | 0.7 | 410 | 75.1 | 41 | 41 | 52.7 |
| 2101 | 3121 | 16366 | 16384 | 50.3 | 52.6 | 5621 | 16774 | 16754 | 50.4 | 42.9 | 0.1 | 409 | 75.1 | 41.1 | 41 | 52.8 |
| 2102 | 3122 | 24569 | 24590 | 56.6 | 54.5 | 5622 | 25089 | 25070 | 55.8 | 55 | 0.8 | 521 | 75.4 | 40.9 | 41 | 54.6 |
| 2103 | 3123 | 24569 | 24590 | 56.6 | 54.5 | 5623 | 25088 | 25069 | 55 | 50 | 1.6 | 520 | 75.3 | 40.8 | 41 | 54.3 |
| 2104 | 3124 | 24567 | 24590 | 57.8 | 54.2 | 5624 | 25095 | 25072 | 59.3 | 54.2 | 1.5 | 529 | 75.4 | 40.8 | 41 | 55.2 |
| 2105 | 3125 | 24568 | 24591 | 58.9 | 54.2 | 5625 | 25095 | 25072 | 59.3 | 54.2 | 0.4 | 528 | 75.3 | 40.7 | 41 | 55.5 |
| 2106 | 3126 | 24568 | 24591 | 58.9 | 54.2 | 5626 | 25091 | 25070 | 59.1 | 54.5 | 0.2 | 524 | 75.4 | 40.8 | 41 | 55.5 |
| 2107 | 3127 | 24568 | 24591 | 58.9 | 54.2 | 5627 | 25090 | 25069 | 58.3 | 54.5 | 0.6 | 523 | 75.4 | 40.9 | 41 | 55.4 |
| 2108 | 3128 | 16366 | 16384 | 50.3 | 52.6 | 5628 | 16774 | 16753 | 51.1 | 40.9 | 0.8 | 409 | 75.1 | 41.1 | 41 | 52.8 |
| 2109 | 3129 | 1806 | 1825 | 51.1 | 45 | 5629 | 2103 | 2082 | 52 | 45.5 | 1 | 298 | 75.5 | 43.6 | 41 | 53.3 |
| 2110 | 3130 | 8374 | 8395 | 52.4 | 45.5 | 5630 | 9107 | 9086 | 51.6 | 45.5 | 0.8 | 734 | 75.5 | 40.2 | 41 | 53.4 |
| 2111 | 3131 | 24622 | 24643 | 57.1 | 54.5 | 5631 | 24935 | 24913 | 56.1 | 47.8 | 1 | 314 | 74.5 | 40.8 | 41 | 54.1 |
| 2112 | 3132 | 9130 | 9150 | 51.3 | 42.9 | 5632 | 9358 | 9338 | 51 | 42.9 | 0.3 | 229 | 74.5 | 42.8 | 41 | 52.5 |
| 2113 | 3133 | 12936 | 12957 | 53.7 | 45.5 | 5633 | 13530 | 13511 | 55.6 | 55 | 1.9 | 595 | 77.4 | 45.4 | 41 | 55.4 |
| 2114 | 3134 | 8373 | 8391 | 50.7 | 47.4 | 5634 | 9107 | 9086 | 51.6 | 45.5 | 0.9 | 735 | 75.4 | 40.1 | 41 | 53.1 |
| 2115 | 3135 | 1352 | 1371 | 56.1 | 55 | 5635 | 1701 | 1678 | 54.3 | 41.7 | 1.8 | 350 | 76.7 | 45.7 | 41 | 55.1 |
| 2116 | 3136 | 8867 | 8886 | 50.7 | 50 | 5636 | 9342 | 9323 | 52.1 | 50 | 1.4 | 476 | 75.7 | 42 | 41 | 53.3 |
| 2117 | 3137 | 1352 | 1371 | 56.1 | 55 | 5637 | 1701 | 1677 | 54.7 | 40 | 1.4 | 350 | 76.7 | 45.7 | 41 | 55.2 |
| 2118 | 3138 | 9130 | 9150 | 51.3 | 42.9 | 5638 | 9249 | 9232 | 50 | 50 | 1.3 | 120 | 71.7 | 42.5 | 41 | 50.3 |
| 2119 | 3139 | 16861 | 16880 | 50.8 | 50 | 5639 | 17062 | 17045 | 50.2 | 50 | 0.6 | 202 | 74.8 | 44.6 | 41 | 52.5 |
| 2120 | 3140 | 9130 | 9150 | 51.3 | 42.9 | 5640 | 9249 | 9231 | 50.8 | 47.4 | 0.5 | 120 | 71.7 | 42.5 | 41 | 50.5 |
| 2121 | 3141 | 9130 | 9150 | 51.3 | 42.9 | 5641 | 9249 | 9230 | 51.5 | 45 | 0.2 | 120 | 71.7 | 42.5 | 41 | 50.7 |
| 2122 | 3142 | 8372 | 8390 | 50.7 | 47.4 | 5642 | 9060 | 9039 | 50.3 | 40.9 | 0.4 | 689 | 75.4 | 40.2 | 41 | 53 |
| 2123 | 3143 | 18074 | 18093 | 50.3 | 45 | 5643 | 18232 | 18212 | 50.6 | 47.6 | 0.3 | 159 | 73.7 | 44 | 41 | 51.8 |
| 2124 | 3144 | 2671 | 2692 | 52.1 | 40.9 | 5644 | 3193 | 3172 | 52.6 | 50 | 0.5 | 523 | 75.8 | 41.9 | 41 | 53.8 |
| 2125 | 3145 | 16562 | 16581 | 52.6 | 50 | 5645 | 17064 | 17045 | 51.4 | 50 | 1.2 | 503 | 75.8 | 42.1 | 41 | 53.6 |
| 2126 | 3146 | 2671 | 2692 | 52.1 | 40.9 | 5646 | 3193 | 3173 | 51.4 | 47.6 | 0.7 | 523 | 75.8 | 41.9 | 41 | 53.6 |
| 2127 | 3147 | 8372 | 8390 | 50.7 | 47.4 | 5647 | 9107 | 9086 | 51.6 | 45.5 | 0.9 | 736 | 75.5 | 40.2 | 41 | 53.1 |
| 2128 | 3148 | 12726 | 12746 | 51.3 | 47.6 | 5648 | 13321 | 13301 | 50.3 | 42.9 | 0.9 | 596 | 76.7 | 43.6 | 41 | 53.9 |
| 2129 | 3149 | 8867 | 8886 | 50.7 | 50 | 5649 | 9312 | 9293 | 50.6 | 45 | 0.1 | 446 | 75.4 | 41.5 | 41 | 53 |
| 2130 | 3150 | 16562 | 16580 | 51.9 | 52.6 | 5650 | 17062 | 17045 | 50.2 | 50 | 1.7 | 501 | 75.8 | 42.1 | 41 | 53.2 |
| 2131 | 3151 | 27377 | 27397 | 53.4 | 47.6 | 5651 | 27674 | 27653 | 52.5 | 40.9 | 0.9 | 298 | 74.3 | 40.6 | 41 | 52.8 |
| 2132 | 3152 | 16556 | 16573 | 50.3 | 50 | 5652 | 17111 | 17090 | 51.1 | 40.9 | 0.8 | 556 | 76.1 | 42.4 | 41 | 53.5 |
| 2133 | 3153 | 7815 | 7833 | 51.5 | 52.6 | 5653 | 8531 | 8512 | 52 | 45 | 0.5 | 717 | 75.7 | 40.7 | 41 | 53.5 |
| 2134 | 3154 | 3223 | 3241 | 50.2 | 52.6 | 5654 | 3494 | 3473 | 50.4 | 40.9 | 0.2 | 272 | 74.6 | 41.9 | 41 | 52.4 |
| 2135 | 3155 | 8372 | 8390 | 50.7 | 47.4 | 5655 | 9109 | 9087 | 50.5 | 43.5 | 0.1 | 738 | 75.4 | 40.1 | 41 | 53.1 |
| 2136 | 3156 | 3041 | 3065 | 57.7 | 48 | 5656 | 3650 | 3628 | 56.3 | 47.8 | 1.4 | 610 | 76.3 | 42.8 | 41 | 55.4 |
| 2137 | 3157 | 9569 | 9591 | 53 | 43.5 | 5657 | 10017 | 9999 | 52.8 | 52.6 | 0.3 | 449 | 75.4 | 41.4 | 41 | 53.7 |
| 2138 | 3158 | 3041 | 3065 | 57.7 | 48 | 5658 | 3649 | 3625 | 56.6 | 44 | 1.2 | 609 | 76.3 | 42.7 | 41 | 55.5 |
| 2139 | 3159 | 13176 | 13196 | 51.4 | 47.6 | 5659 | 13321 | 13301 | 50.3 | 42.9 | 1 | 146 | 73.3 | 43.8 | 41 | 51.5 |
| 2140 | 3160 | 16366 | 16385 | 52.9 | 55 | 5660 | 16775 | 16755 | 51.1 | 42.9 | 1.8 | 410 | 75.1 | 41 | 41 | 53 |
| 2141 | 3161 | 16366 | 16385 | 52.9 | 55 | 5661 | 16775 | 16754 | 51.7 | 40.9 | 1.1 | 410 | 75.1 | 41 | 41 | 53.2 |
| 2142 | 3162 | 16366 | 16385 | 52.9 | 55 | 5662 | 16774 | 16753 | 51.1 | 40.9 | 1.8 | 409 | 75.1 | 41.1 | 41 | 53 |
| 2143 | 3163 | 1402 | 1422 | 50.2 | 42.9 | 5663 | 2104 | 2084 | 50.6 | 42.9 | 0.4 | 703 | 76.7 | 43.2 | 41 | 53.8 |
| 2144 | 3164 | 1402 | 1422 | 50.2 | 42.9 | 5664 | 1697 | 1678 | 50.3 | 45 | 0.1 | 296 | 76 | 44.9 | 41 | 53.4 |
| 2145 | 3165 | 3055 | 3076 | 52.4 | 45.5 | 5665 | 3503 | 3484 | 51.5 | 50 | 1 | 449 | 76.1 | 43.2 | 41 | 53.8 |
| 2146 | 3166 | 15211 | 15230 | 50.2 | 45 | 5666 | 16001 | 15980 | 51.1 | 45.5 | 0.9 | 791 | 75.6 | 40.3 | 41 | 53.1 |
| 2147 | 3167 | 12267 | 12290 | 54.5 | 41.7 | 5667 | 12414 | 12392 | 53.9 | 43.5 | 0.6 | 148 | 72.2 | 41.2 | 41 | 51.8 |
| 2148 | 3168 | 8861 | 8880 | 50.2 | 45 | 5668 | 9256 | 9237 | 50.8 | 45 | 0.6 | 396 | 75 | 40.9 | 41 | 52.6 |
| 2149 | 3169 | 3049 | 3071 | 56.3 | 52.2 | 5669 | 3650 | 3628 | 56.3 | 47.8 | 0 | 602 | 76.4 | 42.9 | 41 | 55.4 |
| 2150 | 3170 | 3049 | 3071 | 56.3 | 52.2 | 5670 | 3648 | 3625 | 55.5 | 41.7 | 0.8 | 600 | 76.3 | 42.7 | 41 | 55.2 |
| 2151 | 3171 | 8861 | 8880 | 50.2 | 45 | 5671 | 9313 | 9294 | 50.4 | 50 | 0.3 | 453 | 75.3 | 41.3 | 41 | 52.9 |
| 2152 | 3172 | 12352 | 12375 | 52.9 | 41.7 | 5672 | 12911 | 12891 | 51.2 | 47.6 | 1.7 | 560 | 76.1 | 42.5 | 41 | 53.7 |
| 2153 | 3173 | 7965 | 7985 | 51.9 | 42.9 | 5673 | 8531 | 8512 | 52 | 45 | 0.2 | 567 | 75.1 | 40 | 41 | 53.2 |
| 2154 | 3174 | 18017 | 18036 | 54.8 | 55 | 5674 | 18233 | 18212 | 53.5 | 50 | 1.3 | 217 | 74.7 | 43.8 | 41 | 53.5 |
| 2155 | 3175 | 8867 | 8886 | 50.7 | 50 | 5675 | 9257 | 9238 | 50.5 | 45 | 0.2 | 391 | 75.1 | 41.2 | 41 | 52.8 |
| 2156 | 3176 | 3221 | 3239 | 51.5 | 52.6 | 5676 | 3494 | 3473 | 50.4 | 40.9 | 1.1 | 274 | 74.5 | 41.6 | 41 | 52.4 |
| 2157 | 3177 | 1402 | 1422 | 50.2 | 42.9 | 5677 | 1697 | 1677 | 51 | 42.9 | 0.8 | 296 | 76 | 44.9 | 41 | 53.4 |
| 2158 | 3178 | 1402 | 1422 | 50.2 | 42.9 | 5678 | 1697 | 1676 | 51.7 | 40.9 | 1.5 | 296 | 76 | 44.9 | 41 | 53.4 |
| 2159 | 3179 | 18011 | 18032 | 55.7 | 54.5 | 5679 | 18220 | 18201 | 56.1 | 55 | 0.4 | 210 | 74.5 | 43.3 | 41 | 53.9 |
| 2160 | 3180 | 12726 | 12746 | 51.3 | 47.6 | 5680 | 13329 | 13308 | 50.5 | 40.9 | 0.8 | 604 | 76.6 | 43.5 | 41 | 53.9 |
| 2161 | 3181 | 1402 | 1425 | 52.8 | 41.7 | 5681 | 1698 | 1678 | 51.7 | 42.9 | 1.1 | 297 | 76 | 44.8 | 41 | 53.8 |
| 2162 | 3182 | 18013 | 18032 | 52.2 | 55 | 5682 | 18223 | 18205 | 53.3 | 52.6 | 1.1 | 211 | 74.4 | 43.1 | 41 | 52.8 |
| 2163 | 3183 | 3777 | 3797 | 51.7 | 47.6 | 5683 | 4444 | 4424 | 50.6 | 42.9 | 1.1 | 668 | 75.6 | 40.7 | 41 | 53.2 |
| 2164 | 3184 | 3777 | 3797 | 51.7 | 47.6 | 5684 | 4445 | 4425 | 50.6 | 42.9 | 1.1 | 669 | 75.6 | 40.7 | 41 | 53.2 |
| 2165 | 3185 | 7876 | 7895 | 51.5 | 45 | 5685 | 8189 | 8170 | 50.6 | 50 | 0.9 | 314 | 75.1 | 42.4 | 41 | 52.9 |
| 2166 | 3186 | 18014 | 18032 | 51 | 52.6 | 5686 | 18229 | 18209 | 50.1 | 42.9 | 0.8 | 216 | 74.2 | 42.6 | 41 | 52.1 |
| 2167 | 3187 | 1402 | 1425 | 52.8 | 41.7 | 5687 | 1697 | 1677 | 51 | 42.9 | 1.8 | 296 | 76 | 44.9 | 41 | 53.6 |
| 2168 | 3188 | 1402 | 1425 | 52.8 | 41.7 | 5688 | 1697 | 1676 | 51.7 | 40.9 | 1.1 | 296 | 76 | 44.9 | 41 | 53.8 |
| 2169 | 3189 | 1402 | 1425 | 52.8 | 41.7 | 5689 | 1501 | 1481 | 51.2 | 42.9 | 1.6 | 100 | 72 | 46 | 41 | 50.9 |
| 2170 | 3190 | 12366 | 12384 | 51.7 | 52.6 | 5690 | 13155 | 13138 | 50.4 | 50 | 1.3 | 790 | 76.8 | 43.4 | 41 | 54 |
| 2171 | 3191 | 27361 | 27380 | 52.4 | 55 | 5691 | 27573 | 27552 | 52.3 | 40.9 | 0.1 | 213 | 75 | 44.6 | 41 | 53.3 |
| 2172 | 3192 | 18006 | 18028 | 54.5 | 52.2 | 5692 | 18220 | 18201 | 56.1 | 55 | 1.6 | 215 | 74.5 | 43.3 | 41 | 53.6 |
| 2173 | 3193 | 1442 | 1461 | 51.6 | 55 | 5693 | 1872 | 1854 | 53.2 | 52.6 | 1.6 | 431 | 76.2 | 43.6 | 41 | 53.9 |
| 2174 | 3194 | 27361 | 27380 | 52.4 | 55 | 5694 | 27567 | 27547 | 51.1 | 42.9 | 1.3 | 207 | 75.1 | 44.9 | 41 | 53 |
| 2175 | 3195 | 9131 | 9151 | 50.4 | 42.9 | 5695 | 9249 | 9230 | 51.5 | 45 | 1.2 | 119 | 71.8 | 42.9 | 41 | 50.5 |
| 2176 | 3196 | 3217 | 3236 | 51.1 | 50 | 5696 | 3504 | 3485 | 50.4 | 45 | 0.7 | 288 | 74.8 | 42 | 41 | 52.6 |
| 2177 | 3197 | 18011 | 18029 | 51.3 | 52.6 | 5697 | 18232 | 18212 | 50.6 | 47.6 | 0.7 | 222 | 74.8 | 43.7 | 41 | 52.6 |
| 2178 | 3198 | 3055 | 3074 | 51.1 | 50 | 5698 | 3503 | 3484 | 51.5 | 50 | 0.4 | 449 | 76.1 | 43.2 | 41 | 53.7 |
| 2179 | 3199 | 8866 | 8886 | 52.3 | 47.6 | 5699 | 9364 | 9346 | 53.9 | 52.6 | 1.6 | 499 | 75.8 | 42.1 | 41 | 53.9 |
| 2180 | 3200 | 16368 | 16387 | 50.2 | 45 | 5700 | 16774 | 16752 | 52.2 | 43.5 | 2 | 407 | 75 | 40.8 | 41 | 52.7 |
| 2181 | 3201 | 8859 | 8879 | 50 | 42.9 | 5701 | 9252 | 9235 | 50.1 | 50 | 0.1 | 394 | 75 | 41.1 | 41 | 52.6 |
| 2182 | 3202 | 9131 | 9151 | 50.4 | 42.9 | 5702 | 9249 | 9231 | 50.8 | 47.4 | 0.5 | 119 | 71.8 | 42.9 | 41 | 50.5 |
| 2183 | 3203 | 3217 | 3236 | 51.1 | 50 | 5703 | 3494 | 3473 | 50.4 | 40.9 | 0.7 | 278 | 74.6 | 41.7 | 41 | 52.4 |
| 2184 | 3204 | 8859 | 8879 | 50 | 42.9 | 5704 | 9341 | 9322 | 51.1 | 50 | 1.1 | 483 | 75.6 | 41.6 | 41 | 53 |
| 2185 | 3205 | 9131 | 9151 | 50.4 | 42.9 | 5705 | 9249 | 9232 | 50 | 50 | 0.3 | 119 | 71.8 | 42.9 | 41 | 50.4 |
| 2186 | 3206 | 8867 | 8886 | 50.7 | 50 | 5706 | 9248 | 9229 | 50.1 | 45 | 0.5 | 382 | 75.1 | 41.4 | 41 | 52.7 |
| 2187 | 3207 | 27366 | 27384 | 52.2 | 52.6 | 5707 | 27576 | 27555 | 51 | 40.9 | 1.2 | 211 | 74.8 | 44.1 | 41 | 52.7 |
| 2188 | 3208 | 1442 | 1461 | 51.6 | 55 | 5708 | 1879 | 1861 | 53 | 52.6 | 1.4 | 438 | 76.2 | 43.6 | 41 | 54 |
| 2189 | 3209 | 12366 | 12384 | 51.7 | 52.6 | 5709 | 12724 | 12705 | 52.4 | 55 | 0.7 | 359 | 75.6 | 42.9 | 41 | 53.5 |
| 2190 | 3210 | 12366 | 12384 | 51.7 | 52.6 | 5710 | 12498 | 12480 | 50 | 47.4 | 1.6 | 133 | 73 | 44.4 | 41 | 51.2 |
| 2191 | 3211 | 98 | 118 | 50.6 | 42.9 | 5711 | 713 | 695 | 50.7 | 47.4 | 0.1 | 616 | 79 | 49.4 | 41 | 55.6 |
| 2192 | 3212 | 12373 | 12391 | 50.8 | 47.4 | 5712 | 13155 | 13138 | 50.4 | 50 | 0.4 | 783 | 76.8 | 43.4 | 41 | 54 |
| 2193 | 3213 | 18011 | 18030 | 52.9 | 55 | 5713 | 18230 | 18209 | 51.3 | 45.5 | 1.6 | 220 | 74.5 | 43.2 | 41 | 52.7 |
| 2194 | 3214 | 1402 | 1426 | 54.1 | 40 | 5714 | 1700 | 1676 | 53.9 | 40 | 0.2 | 299 | 76 | 44.8 | 41 | 54.5 |
| 2195 | 3215 | 18011 | 18030 | 52.9 | 55 | 5715 | 18223 | 18205 | 53.3 | 52.6 | 0.5 | 213 | 74.4 | 43.2 | 41 | 53.1 |
| 2196 | 3216 | 1402 | 1426 | 54.1 | 40 | 5716 | 1698 | 1677 | 52.3 | 40.9 | 1.8 | 297 | 76 | 44.8 | 41 | 54 |
| 2197 | 3217 | 16463 | 16483 | 51.3 | 42.9 | 5717 | 17032 | 17011 | 52 | 45.5 | 0.7 | 570 | 76 | 42.1 | 41 | 53.7 |
| 2198 | 3218 | 18009 | 18030 | 54.6 | 54.5 | 5718 | 18220 | 18201 | 56.1 | 55 | 1.6 | 212 | 74.5 | 43.4 | 41 | 53.6 |
| 2199 | 3219 | 1402 | 1426 | 54.1 | 40 | 5719 | 1700 | 1678 | 52.9 | 43.5 | 1.3 | 299 | 76 | 44.8 | 41 | 54.2 |
| 2200 | 3220 | 9131 | 9151 | 50.4 | 42.9 | 5720 | 9358 | 9338 | 51 | 42.9 | 0.6 | 228 | 74.6 | 43 | 41 | 52.4 |
| 2201 | 3221 | 3055 | 3075 | 51.8 | 47.6 | 5721 | 3503 | 3484 | 51.5 | 50 | 0.3 | 449 | 76.1 | 43.2 | 41 | 53.8 |
| 2202 | 3222 | 18013 | 18031 | 50.6 | 52.6 | 5722 | 18232 | 18212 | 50.6 | 47.6 | 0 | 220 | 74.7 | 43.6 | 41 | 52.6 |
| 2203 | 3223 | 8794 | 8813 | 51.6 | 45 | 5723 | 9249 | 9230 | 51.5 | 45 | 0.1 | 456 | 75.4 | 41.4 | 41 | 53.4 |
| 2204 | 3224 | 8794 | 8813 | 51.6 | 45 | 5724 | 9249 | 9231 | 50.8 | 47.4 | 0.8 | 456 | 75.4 | 41.4 | 41 | 53.1 |
| 2205 | 3225 | 16549 | 16567 | 54.9 | 52.6 | 5725 | 17065 | 17045 | 53.1 | 47.6 | 1.9 | 517 | 76 | 42.4 | 41 | 54.2 |
| 2206 | 3226 | 8794 | 8813 | 51.6 | 45 | 5726 | 9249 | 9232 | 50 | 50 | 1.6 | 456 | 75.4 | 41.4 | 41 | 52.9 |
| 2207 | 3227 | 1402 | 1426 | 54.1 | 40 | 5727 | 2104 | 2082 | 53.5 | 43.5 | 0.6 | 703 | 76.7 | 43.2 | 41 | 54.8 |
| 2208 | 3228 | 9927 | 9946 | 51.3 | 50 | 5728 | 10356 | 10336 | 52.4 | 47.6 | 1.1 | 430 | 75.6 | 42.1 | 41 | 53.4 |
| 2209 | 3229 | 3219 | 3238 | 50.7 | 50 | 5729 | 3494 | 3473 | 50.4 | 40.9 | 0.3 | 276 | 74.5 | 41.7 | 41 | 52.4 |
| 2210 | 3230 | 16549 | 16567 | 54.9 | 52.6 | 5730 | 17033 | 17011 | 53.2 | 43.5 | 1.7 | 485 | 75.8 | 42.1 | 41 | 54.1 |
| 2211 | 3231 | 18014 | 18032 | 51 | 52.6 | 5731 | 18702 | 18685 | 50.2 | 50 | 0.8 | 689 | 76.2 | 42.2 | 41 | 53.5 |
| 2212 | 3232 | 8794 | 8813 | 51.6 | 45 | 5732 | 9333 | 9315 | 52.2 | 52.6 | 0.6 | 540 | 75.9 | 42 | 41 | 53.7 |
| 2213 | 3233 | 8867 | 8888 | 52.7 | 45.5 | 5733 | 9249 | 9229 | 53 | 47.6 | 0.2 | 383 | 75.2 | 41.5 | 41 | 53.5 |
| 2214 | 3234 | 18009 | 18028 | 51.6 | 55 | 5734 | 18229 | 18209 | 50.1 | 42.9 | 1.5 | 221 | 74.5 | 43 | 41 | 52.3 |
| 2215 | 3235 | 9633 | 9651 | 51 | 47.4 | 5735 | 10017 | 9999 | 52.8 | 52.6 | 1.8 | 385 | 75.6 | 42.6 | 41 | 53.3 |
| 2216 | 3236 | 9915 | 9935 | 51.8 | 47.6 | 5736 | 10449 | 10428 | 51.9 | 40.9 | 0.1 | 535 | 75.4 | 40.9 | 41 | 53.4 |
| 2217 | 3237 | 29259 | 29277 | 50.9 | 52.6 | 5737 | 29414 | 29395 | 50.5 | 50 | 0.3 | 156 | 74.5 | 46.2 | 41 | 52.4 |
| 2218 | 3238 | 8868 | 8889 | 50.4 | 40.9 | 5738 | 9317 | 9297 | 50.5 | 42.9 | 0.1 | 450 | 75.4 | 41.6 | 41 | 53 |
| 2219 | 3239 | 29257 | 29276 | 51.3 | 50 | 5739 | 29414 | 29395 | 50.5 | 50 | 0.8 | 158 | 74.6 | 46.2 | 41 | 52.5 |
| 2220 | 3240 | 13176 | 13196 | 51.4 | 47.6 | 5740 | 13332 | 13312 | 50.9 | 47.6 | 0.5 | 157 | 73.6 | 43.9 | 41 | 51.9 |
| 2221 | 3241 | 9918 | 9938 | 51.4 | 47.6 | 5741 | 10449 | 10428 | 51.9 | 40.9 | 0.5 | 53.2 | 75.4 | 40.8 | 41 | 53.3 |
| 2222 | 3242 | 13176 | 13196 | 51.4 | 47.6 | 5742 | 13856 | 13835 | 50.1 | 45.5 | 1.3 | 681 | 75.8 | 41.1 | 41 | 53.2 |
| 2223 | 3243 | 29253 | 29270 | 50 | 50 | 5743 | 29414 | 29395 | 50.5 | 50 | 0.5 | 162 | 75.2 | 47.5 | 41 | 52.8 |
| 2224 | 3244 | 13037 | 13058 | 54.8 | 50 | 5744 | 13530 | 13511 | 55.6 | 55 | 0.8 | 494 | 77.3 | 45.7 | 41 | 55.6 |
| 2225 | 3245 | 18009 | 18028 | 51.6 | 55 | 5745 | 18702 | 18685 | 50.2 | 50 | 1.5 | 694 | 76.3 | 42.4 | 41 | 53.6 |
| 2226 | 3246 | 24178 | 24197 | 50.3 | 40 | 5746 | 24938 | 24921 | 50.4 | 50 | 0.1 | 761 | 75.8 | 40.9 | 41 | 53.2 |
| 2227 | 3247 | 24174 | 24195 | 52.5 | 40.9 | 5747 | 24740 | 24717 | 52.5 | 41.7 | 0 | 567 | 76 | 42.2 | 41 | 54 |
| 2228 | 3248 | 7679 | 7698 | 50.6 | 50 | 5748 | 8054 | 8035 | 50.4 | 50 | 0.1 | 376 | 75.6 | 42.6 | 41 | 53.1 |
| 2229 | 3249 | 18005 | 18024 | 51.1 | 50 | 5749 | 18229 | 18209 | 50.1 | 42.9 | 1 | 225 | 74.4 | 42.7 | 41 | 52.2 |
| 2230 | 3250 | 24174 | 24195 | 52.5 | 40.9 | 5750 | 24933 | 24913 | 51.1 | 42.9 | 1.4 | 760 | 75.8 | 40.9 | 41 | 53.5 |
| 2231 | 3251 | 3016 | 3036 | 50.2 | 42.9 | 5751 | 3500 | 3481 | 51.2 | 50 | 0.9 | 485 | 76.3 | 43.3 | 41 | 53.6 |
| 2232 | 3252 | 28820 | 28838 | 53.7 | 52.6 | 5752 | 29306 | 29288 | 53.5 | 52.6 | 0.2 | 487 | 77.1 | 45.4 | 41 | 55.1 |
| 2233 | 3253 | 18005 | 18024 | 51.1 | 50 | 5753 | 18233 | 18214 | 52 | 50 | 0.9 | 229 | 74.9 | 43.7 | 41 | 52.8 |
| 2234 | 3254 | 3016 | 3036 | 50.2 | 42.9 | 5754 | 3503 | 3484 | 51.5 | 50 | 1.2 | 488 | 76.3 | 43.4 | 41 | 53.6 |
| 2235 | 3255 | 7723 | 7741 | 52.2 | 52.6 | 5755 | 8054 | 8035 | 50.4 | 50 | 1.7 | 332 | 75 | 41.9 | 41 | 52.8 |
| 2236 | 3256 | 29200 | 29224 | 54.2 | 40 | 5756 | 29358 | 29339 | 52.8 | 50 | 1.4 | 159 | 74.5 | 45.9 | 41 | 53.1 |
| 2237 | 3257 | 3016 | 3036 | 50.2 | 42.9 | 5757 | 3504 | 3485 | 50.4 | 45 | 0.1 | 489 | 76.3 | 43.4 | 41 | 53.6 |
| 2238 | 3258 | 985 | 1004 | 51.1 | 50 | 5758 | 1499 | 1482 | 50.1 | 50 | 1.1 | 515 | 76.5 | 43.7 | 41 | 53.7 |
| 2239 | 3259 | 8866 | 8885 | 51.1 | 45 | 5759 | 9257 | 9238 | 50.5 | 45 | 0.6 | 392 | 75 | 41.1 | 41 | 52.8 |
| 2240 | 3260 | 3016 | 3036 | 50.2 | 42.9 | 5760 | 3647 | 3628 | 50.6 | 45 | 0.4 | 632 | 76.4 | 42.9 | 41 | 53.7 |
| 2241 | 3261 | 13039 | 13058 | 51.8 | 50 | 5761 | 13749 | 13727 | 50.5 | 43.5 | 1.3 | 711 | 76.7 | 43.2 | 41 | 53.9 |
| 2242 | 3262 | 24096 | 24119 | 54.4 | 41.7 | 5762 | 24815 | 24792 | 53.4 | 41.7 | 1 | 720 | 75.8 | 41 | 41 | 54.2 |
| 2243 | 3263 | 17840 | 17859 | 50.8 | 45 | 5763 | 18229 | 18209 | 50.1 | 42.9 | 0.7 | 390 | 74.7 | 40.3 | 41 | 52.4 |
| 2244 | 3264 | 15255 | 15273 | 50.3 | 52.6 | 5764 | 15647 | 15628 | 51 | 45 | 0.7 | 393 | 75.1 | 41.2 | 41 | 52.7 |
| 2245 | 3265 | 988 | 1006 | 52.2 | 52.6 | 5765 | 1500 | 1482 | 50.6 | 47.4 | 1.6 | 513 | 76.5 | 43.7 | 41 | 53.8 |
| 2246 | 3266 | 24035 | 24053 | 52.2 | 52.6 | 5766 | 24527 | 24508 | 50.5 | 45 | 1.7 | 493 | 75.4 | 41.2 | 41 | 53 |
| 2247 | 3267 | 18616 | 18636 | 51.4 | 47.6 | 5767 | 19215 | 19194 | 50.2 | 40.9 | 1.1 | 600 | 75.7 | 41.2 | 41 | 53.1 |
| 2248 | 3268 | 8374 | 8393 | 51.2 | 45 | 5768 | 9101 | 9081 | 50.5 | 47.6 | 0.7 | 728 | 75.5 | 40.2 | 41 | 53.1 |
| 2249 | 3269 | 17840 | 17859 | 50.8 | 45 | 5769 | 18238 | 18219 | 50.3 | 45 | 0.5 | 399 | 75 | 40.9 | 41 | 52.7 |
| 2250 | 3270 | 24030 | 24047 | 50.7 | 50 | 5770 | 24526 | 24506 | 50.3 | 42.9 | 0.4 | 497 | 75.5 | 41.2 | 41 | 53 |
| 2251 | 3271 | 24030 | 24047 | 50.7 | 50 | 5771 | 24527 | 24507 | 51 | 42.9 | 0.3 | 498 | 75.4 | 41.2 | 41 | 53.1 |
| 2252 | 3272 | 17840 | 17859 | 50.8 | 45 | 5772 | 18239 | 18220 | 50 | 45 | 0.8 | 400 | 74.9 | 40.8 | 41 | 52.6 |
| 2253 | 3273 | 985 | 1008 | 56.1 | 50 | 5773 | 1626 | 1602 | 56.1 | 44 | 0 | 642 | 77.1 | 44.5 | 41 | 55.9 |
| 2254 | 3274 | 13039 | 13057 | 51.1 | 52.6 | 5774 | 13749 | 13727 | 50.5 | 43.5 | 0.6 | 711 | 76.7 | 43.2 | 41 | 53.9 |
| 2255 | 3275 | 29200 | 29223 | 53.7 | 41.7 | 5775 | 29358 | 29339 | 52.8 | 50 | 0.9 | 159 | 74.5 | 45.9 | 41 | 53.1 |
| 2256 | 3276 | 1046 | 1063 | 50.3 | 50 | 5776 | 1498 | 1481 | 51 | 50 | 0.7 | 453 | 76.4 | 43.9 | 41 | 53.7 |
| 2257 | 3277 | 24019 | 24039 | 50.1 | 42.9 | 5777 | 24527 | 24508 | 50.5 | 45 | 0.4 | 509 | 75.4 | 41.1 | 41 | 52.9 |
| 2258 | 3278 | 24014 | 24035 | 50.6 | 40.9 | 5778 | 24527 | 24508 | 50.5 | 45 | 0.1 | 514 | 75.5 | 41.2 | 41 | 53.1 |
| 2259 | 3279 | 1046 | 1063 | 50.3 | 50 | 5779 | 1497 | 1480 | 50.3 | 50 | 0.1 | 452 | 76.5 | 44 | 41 | 53.7 |
| 2260 | 3280 | 29201 | 29222 | 51 | 40.9 | 5780 | 29358 | 29339 | 52.8 | 50 | 1.9 | 158 | 74.3 | 45.6 | 41 | 52.4 |
| 2261 | 3281 | 18583 | 18603 | 54.8 | 47.6 | 5781 | 18696 | 18672 | 53.9 | 40 | 0.8 | 114 | 70.5 | 40.4 | 41 | 50.6 |
| 2262 | 3282 | 12977 | 12996 | 50.2 | 40 | 5782 | 13326 | 13306 | 50.7 | 42.9 | 0.4 | 350 | 76 | 44 | 41 | 53.4 |
| 2263 | 3283 | 23843 | 23863 | 50.3 | 42.9 | 5783 | 24088 | 24070 | 50.5 | 52.6 | 0.2 | 246 | 75.7 | 45.1 | 41 | 53.2 |
| 2264 | 3284 | 29200 | 29221 | 52.6 | 45.5 | 5784 | 29358 | 29339 | 52.8 | 50 | 0.2 | 159 | 74.5 | 45.9 | 41 | 53 |
| 2265 | 3285 | 23843 | 23863 | 50.3 | 42.9 | 5785 | 24091 | 24073 | 50.9 | 52.6 | 0.5 | 249 | 75.8 | 45.4 | 41 | 53.3 |
| 2266 | 3286 | 17792 | 17813 | 51.6 | 40.9 | 5786 | 18231 | 18210 | 52.2 | 45.5 | 0.6 | 440 | 75 | 40.5 | 41 | 53.1 |
| 2267 | 3287 | 23843 | 23863 | 50.3 | 42.9 | 5787 | 24094 | 24076 | 50.9 | 52.6 | 0.5 | 252 | 75.9 | 45.6 | 41 | 53.4 |
| 2268 | 3288 | 8374 | 8393 | 51.2 | 45 | 5788 | 9109 | 9087 | 50.5 | 43.5 | 0.6 | 736 | 75.4 | 40.1 | 41 | 53.1 |
| 2269 | 3289 | 17793 | 17813 | 50 | 42.9 | 5789 | 18223 | 18206 | 51.8 | 50 | 1.7 | 431 | 74.9 | 40.4 | 41 | 52.5 |
| 2270 | 3290 | 1046 | 1063 | 50.3 | 50 | 5790 | 1481 | 1463 | 50.5 | 47.4 | 0.2 | 436 | 76.2 | 43.6 | 41 | 53.6 |
| 2271 | 3291 | 23842 | 23862 | 50.9 | 47.6 | 5791 | 24093 | 24075 | 50.9 | 52.6 | 0 | 252 | 75.9 | 45.6 | 41 | 53.5 |
| 2272 | 3292 | 23842 | 23862 | 50.9 | 47.6 | 5792 | 24527 | 24507 | 51 | 42.9 | 0.1 | 686 | 76.1 | 41.8 | 41 | 53.6 |
| 2273 | 3293 | 2823 | 2844 | 50.4 | 45.5 | 5793 | 3082 | 3058 | 52.3 | 40 | 1.9 | 260 | 74.3 | 41.5 | 41 | 52.3 |
| 2274 | 3294 | 18550 | 18571 | 50.4 | 40.9 | 5794 | 19316 | 19295 | 50 | 40.9 | 0.4 | 767 | 75.5 | 40.3 | 41 | 53 |
| 2275 | 3295 | 23841 | 23860 | 52.1 | 55 | 5795 | 24527 | 24507 | 51 | 42.9 | 1.1 | 687 | 76.1 | 41.9 | 41 | 53.7 |
| 2276 | 3296 | 23841 | 23860 | 52.1 | 55 | 5796 | 24527 | 24508 | 50.5 | 45 | 1.6 | 687 | 76.1 | 41.9 | 41 | 53.5 |
| 2277 | 3297 | 17793 | 17813 | 50 | 42.9 | 5797 | 18233 | 18215 | 51.3 | 52.6 | 1.3 | 441 | 75.1 | 40.8 | 41 | 52.7 |
| 2278 | 3298 | 1 | 19 | 50.1 | 52.6 | 5798 | 269 | 251 | 51.1 | 52.6 | 1.1 | 269 | 76.4 | 46.5 | 41 | 53.6 |
| 2279 | 3299 | 23841 | 23859 | 50.5 | 52.6 | 5799 | 24094 | 24076 | 50.9 | 52.6 | 0.4 | 254 | 76.1 | 46.1 | 41 | 53.5 |
| 2280 | 3300 | 8908 | 8925 | 51.1 | 50 | 5800 | 9249 | 9231 | 50.8 | 47.4 | 0.2 | 342 | 75.1 | 41.8 | 41 | 52.9 |
| 2281 | 3301 | 8908 | 8925 | 51.1 | 50 | 5801 | 9249 | 9230 | 51.5 | 45 | 0.5 | 342 | 75.1 | 41.8 | 41 | 53 |
| 2282 | 3302 | 23841 | 23859 | 50.5 | 52.6 | 5802 | 24500 | 24481 | 50.1 | 45 | 0.4 | 660 | 76.1 | 42.1 | 41 | 53.4 |
| 2283 | 3303 | 23841 | 23859 | 50.5 | 52.6 | 5803 | 24526 | 24506 | 50.3 | 42.9 | 0.2 | 686 | 76.1 | 42 | 41 | 53.5 |
| 2284 | 3304 | 18225 | 18243 | 51.4 | 52.6 | 5804 | 18632 | 18611 | 50.2 | 40.9 | 1.2 | 408 | 75.7 | 42.6 | 41 | 53.2 |
| 2285 | 3305 | 3794 | 3812 | 52.9 | 52.6 | 5805 | 4318 | 4294 | 54.4 | 40 | 1.5 | 525 | 75.5 | 41.1 | 41 | 53.8 |
| 2286 | 3306 | 8908 | 8925 | 51.1 | 50 | 5806 | 9245 | 9226 | 50 | 45 | 1 | 338 | 74.9 | 41.4 | 41 | 52.5 |
| 2287 | 3307 | 17790 | 17811 | 51.6 | 40.9 | 5807 | 18231 | 18210 | 52.2 | 45.5 | 0.6 | 442 | 75 | 40.5 | 41 | 53.1 |
| 2288 | 3308 | 18077 | 18100 | 54.7 | 45.8 | 5808 | 18443 | 18424 | 55.9 | 55 | 1.3 | 367 | 75.8 | 43.3 | 41 | 54.6 |
| 2289 | 3309 | 23838 | 23857 | 50.4 | 50 | 5809 | 24527 | 24507 | 51 | 42.9 | 0.6 | 690 | 76 | 41.7 | 41 | 53.4 |
| 2290 | 3310 | 23838 | 23857 | 50.4 | 50 | 5810 | 24527 | 24508 | 50.5 | 45 | 0.1 | 690 | 76 | 41.7 | 41 | 53.4 |
| 2291 | 3311 | 23735 | 23752 | 51.2 | 50 | 5811 | 24013 | 23995 | 50.3 | 47.4 | 0.8 | 279 | 74.1 | 40.5 | 41 | 52.1 |
| 2292 | 3312 | 18080 | 18100 | 53.3 | 47.6 | 5812 | 18220 | 18202 | 54.8 | 52.6 | 1.5 | 141 | 73.1 | 44 | 41 | 52.3 |
| 2293 | 3313 | 18081 | 18100 | 51.7 | 50 | 5813 | 18223 | 18206 | 51.8 | 50 | 0.1 | 143 | 73.2 | 44.1 | 41 | 51.9 |
| 2294 | 3314 | 18081 | 18100 | 51.7 | 50 | 5814 | 18231 | 18210 | 52.2 | 45.5 | 0.5 | 151 | 73.6 | 44.4 | 41 | 52.1 |
| 2295 | 3315 | 18081 | 18100 | 51.7 | 50 | 5815 | 18233 | 18214 | 52 | 50 | 0.4 | 153 | 74 | 45.1 | 41 | 52.4 |
| 2296 | 3316 | 18081 | 18100 | 51.7 | 50 | 5816 | 18233 | 18215 | 51.3 | 52.6 | 0.4 | 153 | 74 | 45.1 | 41 | 52.3 |
| 2297 | 3317 | 8911 | 8928 | 51.9 | 50 | 5817 | 9252 | 9235 | 50.1 | 50 | 1.8 | 342 | 75 | 41.5 | 41 | 52.6 |
| 2298 | 3318 | 17791 | 17811 | 50 | 42.9 | 5818 | 18223 | 18206 | 51.8 | 50 | 1.7 | 433 | 74.9 | 40.4 | 41 | 52.5 |
| 2299 | 3319 | 8911 | 8928 | 51.9 | 50 | 5819 | 9249 | 9231 | 50.8 | 47.4 | 1 | 339 | 75 | 41.6 | 41 | 52.8 |
| 2300 | 3320 | 12352 | 12375 | 52.9 | 41.7 | 5820 | 12912 | 12892 | 53.6 | 52.4 | 0.8 | 561 | 76.2 | 42.6 | 41 | 54.3 |
| 2301 | 3321 | 8911 | 8928 | 51.9 | 50 | 5821 | 9249 | 9230 | 51.5 | 45 | 0.3 | 339 | 75 | 41.6 | 41 | 53 |
| 2302 | 3322 | 12352 | 12375 | 52.9 | 41.7 | 5822 | 12995 | 12976 | 51.1 | 45 | 1.8 | 644 | 76.4 | 42.9 | 41 | 53.9 |
| 2303 | 3323 | 17791 | 17811 | 50 | 42.9 | 5823 | 18233 | 18215 | 51.3 | 52.6 | 1.3 | 443 | 75.1 | 40.9 | 41 | 52.7 |
| 2304 | 3324 | 12977 | 12996 | 50.2 | 40 | 5824 | 13328 | 13307 | 51.2 | 45.5 | 1 | 352 | 76 | 44 | 41 | 53.4 |
| 2305 | 3325 | 12977 | 12996 | 50.2 | 40 | 5825 | 13329 | 13308 | 50.5 | 40.9 | 0.3 | 353 | 76 | 43.9 | 41 | 53.4 |
| 2306 | 3326 | 8911 | 8928 | 51.9 | 50 | 5826 | 9245 | 9226 | 50 | 45 | 1.8 | 335 | 74.8 | 41.2 | 41 | 52.5 |
| 2307 | 3327 | 8913 | 8931 | 55.5 | 52.6 | 5827 | 9252 | 9231 | 54 | 45.5 | 1.5 | 340 | 74.9 | 41.5 | 41 | 53.7 |
| 2308 | 3328 | 1402 | 1425 | 52.8 | 41.7 | 5828 | 1501 | 1480 | 51.9 | 40.9 | 0.9 | 100 | 72 | 46 | 41 | 51.1 |
| 2309 | 3329 | 24941 | 24960 | 52 | 50 | 5829 | 25646 | 25627 | 50.5 | 45 | 1.5 | 706 | 75.4 | 40.2 | 41 | 53 |
| 2310 | 3330 | 17608 | 17628 | 50.9 | 42.9 | 5830 | 17769 | 17749 | 50 | 42.9 | 0.9 | 162 | 72.4 | 40.7 | 41 | 50.8 |
| 2311 | 3331 | 24941 | 24960 | 52 | 50 | 5831 | 25404 | 25386 | 52.7 | 52.6 | 0.7 | 464 | 75.3 | 41.2 | 41 | 53.4 |
| 2312 | 3332 | 24941 | 24960 | 52 | 50 | 5832 | 25401 | 25383 | 50.6 | 47.4 | 1.4 | 461 | 75.2 | 41 | 41 | 53 |
| 2313 | 3333 | 24941 | 24960 | 52 | 50 | 5833 | 25400 | 25382 | 51.4 | 52.6 | 0.6 | 460 | 75.3 | 41.1 | 41 | 53.2 |
| 2314 | 3334 | 17608 | 17628 | 50.9 | 42.9 | 5834 | 18231 | 18210 | 52.2 | 45.5 | 1.2 | 624 | 75.2 | 40.1 | 41 | 53.1 |
| 2315 | 3335 | 18081 | 18099 | 51.2 | 52.6 | 5835 | 18232 | 18212 | 50.6 | 47.6 | 0.6 | 152 | 73.8 | 44.7 | 41 | 51.9 |
| 2316 | 3336 | 7725 | 7742 | 50 | 50 | 5836 | 7853 | 7833 | 50.7 | 47.6 | 0.7 | 129 | 71.2 | 40.3 | 41 | 49.9 |
| 2317 | 3337 | 8913 | 8931 | 55.5 | 52.6 | 5837 | 9252 | 9230 | 54.5 | 43.5 | 1 | 340 | 74.9 | 41.5 | 41 | 53.9 |
| 2318 | 3338 | 17608 | 17628 | 50.9 | 42.9 | 5838 | 18233 | 18215 | 51.3 | 52.6 | 0.4 | 626 | 75.3 | 40.3 | 41 | 53.1 |
| 2319 | 3339 | 19715 | 19735 | 52.5 | 47.6 | 5839 | 19931 | 19912 | 50.9 | 55 | 1.6 | 217 | 74 | 41.9 | 41 | 52.2 |
| 2320 | 3340 | 8913 | 8931 | 55.5 | 52.6 | 5840 | 9248 | 9226 | 54.7 | 47.8 | 0.7 | 336 | 74.9 | 41.4 | 41 | 53.9 |
| 2321 | 3341 | 18081 | 18099 | 51.2 | 52.6 | 5841 | 18642 | 18622 | 50.5 | 42.9 | 0.7 | 562 | 76.2 | 42.7 | 41 | 53.6 |
| 2322 | 3342 | 2823 | 2844 | 50.4 | 45.5 | 5842 | 3189 | 3168 | 51 | 45.5 | 0.5 | 367 | 75.6 | 42.8 | 41 | 53.2 |
| 2323 | 3343 | 19715 | 19735 | 52.5 | 47.6 | 5843 | 19927 | 19908 | 52.1 | 55 | 0.3 | 213 | 73.9 | 41.8 | 41 | 52.4 |
| 2324 | 3344 | 2823 | 2844 | 50.4 | 45.5 | 5844 | 3190 | 3169 | 50.7 | 45.5 | 0.2 | 368 | 75.6 | 42.7 | 41 | 53.1 |
| 2325 | 3345 | 28936 | 28956 | 55.2 | 52.4 | 5845 | 29306 | 29287 | 54.6 | 55 | 0.6 | 371 | 76.6 | 45.3 | 41 | 55.1 |
| 2326 | 3346 | 28936 | 28956 | 55.2 | 52.4 | 5846 | 29306 | 29285 | 56.7 | 54.5 | 1.6 | 371 | 76.6 | 45.3 | 41 | 55.3 |
| 2327 | 3347 | 28523 | 28544 | 51.6 | 40.9 | 5847 | 29298 | 29280 | 51.4 | 52.6 | 0.2 | 776 | 78.4 | 47.3 | 41 | 55.4 |
| 2328 | 3348 | 24180 | 24199 | 50.3 | 40 | 5848 | 24933 | 24913 | 51.1 | 42.9 | 0.9 | 754 | 75.8 | 40.8 | 41 | 53.2 |
| 2329 | 3349 | 19715 | 19735 | 52.5 | 47.6 | 5849 | 19925 | 19905 | 51.4 | 52.4 | 1.1 | 211 | 73.8 | 41.7 | 41 | 52.2 |
| 2330 | 3350 | 4645 | 4665 | 50.2 | 42.9 | 5850 | 4836 | 4817 | 51.2 | 45 | 0.9 | 192 | 75 | 45.3 | 41 | 52.6 |
| 2331 | 3351 | 18081 | 18099 | 51.2 | 52.6 | 5851 | 18702 | 18685 | 50.2 | 50 | 1 | 622 | 76.2 | 42.4 | 41 | 53.5 |
| 2332 | 3352 | 28522 | 28542 | 50.2 | 42.9 | 5852 | 29298 | 29280 | 51.4 | 52.6 | 1.2 | 777 | 78.4 | 47.2 | 41 | 55.1 |
| 2333 | 3353 | 24179 | 24199 | 52.7 | 42.9 | 5853 | 24740 | 24717 | 52.5 | 41.7 | 0.2 | 562 | 76 | 42.2 | 41 | 54 |
| 2334 | 3354 | 19715 | 19735 | 52.5 | 47.6 | 5854 | 19909 | 19885 | 52.5 | 40 | 0 | 195 | 73.3 | 41 | 41 | 52.1 |
| 2335 | 3355 | 1810 | 1830 | 51.2 | 42.9 | 5855 | 2103 | 2082 | 52 | 45.5 | 0.8 | 294 | 75.5 | 43.5 | 41 | 53.3 |
| 2336 | 3356 | 19716 | 19737 | 52.2 | 45.5 | 5856 | 19909 | 19885 | 52.5 | 40 | 0.3 | 194 | 73.1 | 40.7 | 41 | 51.9 |
| 2337 | 3357 | 19719 | 19739 | 50.6 | 42.9 | 5857 | 19909 | 19885 | 52.5 | 40 | 1.9 | 191 | 72.9 | 40.3 | 41 | 51.3 |
| 2338 | 3358 | 12977 | 12996 | 50.2 | 40 | 5858 | 13332 | 13312 | 50.9 | 47.6 | 0.6 | 356 | 76.1 | 44.1 | 41 | 53.4 |
| 2339 | 3359 | 19721 | 19745 | 52.3 | 40 | 5859 | 19909 | 19885 | 52.5 | 40 | 0.2 | 189 | 73 | 40.7 | 41 | 51.9 |
| 2340 | 3360 | 17608 | 17627 | 50.2 | 45 | 5860 | 17769 | 17749 | 50 | 42.9 | 0.2 | 162 | 72.4 | 40.7 | 41 | 50.8 |
| 2341 | 3361 | 17608 | 17627 | 50.2 | 45 | 5861 | 18231 | 18210 | 52.2 | 45.5 | 2 | 624 | 75.2 | 40.1 | 41 | 52.8 |
| 2342 | 3362 | 19794 | 19813 | 50 | 50 | 5862 | 20099 | 20078 | 50.5 | 40.9 | 0.5 | 306 | 74.4 | 40.8 | 41 | 52.2 |
| 2343 | 3363 | 4658 | 4677 | 50.5 | 50 | 5863 | 5306 | 5289 | 50.8 | 50 | 0.3 | 649 | 75.5 | 40.7 | 41 | 53.1 |
| 2344 | 3364 | 24179 | 24200 | 53.3 | 40.9 | 5864 | 24580 | 24560 | 51.3 | 52.4 | 2 | 402 | 74.6 | 40 | 41 | 52.7 |
| 2345 | 3365 | 19794 | 19813 | 50 | 50 | 5865 | 19925 | 19906 | 50.1 | 50 | 0.1 | 132 | 72.8 | 43.9 | 41 | 51.1 |
| 2346 | 3366 | 1046 | 1064 | 51.2 | 47.4 | 5866 | 1498 | 1481 | 51 | 50 | 0.2 | 453 | 76.4 | 43.9 | 41 | 53.9 |
| 2347 | 3367 | 1046 | 1064 | 51.2 | 47.4 | 5867 | 1497 | 1480 | 50.3 | 50 | 0.9 | 452 | 76.5 | 44 | 41 | 53.7 |
| 2348 | 3368 | 2133 | 2152 | 50.7 | 45 | 5868 | 2675 | 2656 | 50.4 | 50 | 0.3 | 543 | 76.8 | 44.2 | 41 | 54 |
| 2349 | 3369 | 28965 | 28984 | 52.9 | 55 | 5869 | 29298 | 29279 | 52.6 | 55 | 0.3 | 334 | 76.4 | 45.2 | 41 | 54.4 |
| 2350 | 3370 | 24378 | 24397 | 55 | 55 | 5870 | 24564 | 24542 | 55 | 47.8 | 0 | 187 | 73.6 | 42.2 | 41 | 53.1 |
| 2351 | 3371 | 25348 | 25366 | 51.2 | 47.4 | 5871 | 25651 | 25632 | 52.7 | 50 | 1.6 | 304 | 74.7 | 41.4 | 41 | 52.7 |
| 2352 | 3372 | 19794 | 19813 | 50 | 50 | 5872 | 19923 | 19903 | 50.9 | 47.6 | 0.9 | 130 | 72.7 | 43.8 | 41 | 51 |
| 2353 | 3373 | 28967 | 28987 | 51.6 | 52.4 | 5873 | 29358 | 29339 | 52.8 | 50 | 1.2 | 392 | 76.5 | 44.6 | 41 | 54.1 |
| 2354 | 3374 | 17608 | 17627 | 50.2 | 45 | 5874 | 18233 | 18215 | 51.3 | 52.6 | 1.1 | 626 | 75.3 | 40.3 | 41 | 52.9 |
| 2355 | 3375 | 29186 | 29206 | 51.3 | 42.9 | 5875 | 29358 | 29339 | 52.8 | 50 | 1.5 | 173 | 74.5 | 45.1 | 41 | 52.6 |
| 2356 | 3376 | 24379 | 24398 | 55 | 55 | 5876 | 25093 | 25074 | 54.6 | 55 | 0.4 | 715 | 75.9 | 41.4 | 41 | 54.6 |
| 2357 | 3377 | 3170 | 3191 | 50.9 | 45.5 | 5877 | 3646 | 3625 | 52 | 40.9 | 1.1 | 477 | 75.7 | 41.9 | 41 | 53.4 |
| 2358 | 3378 | 3170 | 3191 | 50.9 | 45.5 | 5878 | 3647 | 3628 | 50.6 | 45 | 0.3 | 478 | 75.7 | 42.1 | 41 | 53.3 |
| 2359 | 3379 | 9140 | 9159 | 50.1 | 45 | 5879 | 9249 | 9230 | 51.5 | 45 | 1.4 | 110 | 71.3 | 42.7 | 41 | 50 |
| 2360 | 3380 | 12976 | 12995 | 51.1 | 45 | 5880 | 13326 | 13306 | 50.7 | 42.9 | 0.4 | 351 | 76.1 | 44.2 | 41 | 53.6 |
| 2361 | 3381 | 12976 | 12995 | 51.1 | 45 | 5881 | 13328 | 13307 | 51.2 | 45.5 | 0.1 | 353 | 76.1 | 44.2 | 41 | 53.7 |
| 2362 | 3382 | 3168 | 3189 | 51 | 45.5 | 5882 | 3494 | 3473 | 50.4 | 40.9 | 0.5 | 327 | 75.1 | 42.2 | 41 | 52.8 |
| 2363 | 3383 | 19794 | 19813 | 50 | 50 | 5883 | 19917 | 19896 | 50.9 | 45.5 | 0.9 | 124 | 72.3 | 43.5 | 41 | 50.7 |
| 2364 | 3384 | 24379 | 24398 | 55 | 55 | 5884 | 24517 | 24494 | 53.2 | 41.7 | 1.8 | 139 | 72.7 | 43.2 | 41 | 52 |
| 2365 | 3385 | 24380 | 24399 | 55 | 55 | 5885 | 25093 | 25074 | 54.6 | 55 | 0.4 | 714 | 76 | 41.5 | 41 | 54.6 |
| 2366 | 3386 | 2823 | 2844 | 50.4 | 45.5 | 5886 | 3201 | 3183 | 50.6 | 52.6 | 0.2 | 379 | 75.8 | 43 | 41 | 53.3 |
| 2367 | 3387 | 3798 | 3819 | 54.2 | 50 | 5887 | 4318 | 4294 | 54.4 | 40 | 0.2 | 521 | 75.4 | 41.1 | 41 | 54.2 |
| 2368 | 3388 | 9139 | 9159 | 52.5 | 47.6 | 5888 | 9852 | 9829 | 53.1 | 45.8 | 0.6 | 714 | 75.4 | 40.1 | 41 | 53.6 |
| 2369 | 3389 | 9139 | 9159 | 52.5 | 47.6 | 5889 | 9852 | 9828 | 53.6 | 44 | 1.1 | 714 | 75.4 | 40.1 | 41 | 53.6 |
| 2370 | 3390 | 19795 | 19814 | 50.4 | 45 | 5890 | 19927 | 19908 | 52.1 | 55 | 1.7 | 133 | 72.7 | 43.6 | 41 | 51.1 |
| 2371 | 3391 | 19795 | 19814 | 50.4 | 45 | 5891 | 19924 | 19905 | 50.1 | 50 | 0.3 | 130 | 72.4 | 43.1 | 41 | 50.8 |
| 2372 | 3392 | 12976 | 12995 | 51.1 | 45 | 5892 | 13329 | 13308 | 50.5 | 40.9 | 0.6 | 354 | 76.1 | 44.1 | 41 | 53.5 |
| 2373 | 3393 | 2133 | 2152 | 50.7 | 45 | 5893 | 2672 | 2654 | 50.9 | 52.6 | 0.2 | 540 | 76.8 | 44.3 | 41 | 54.1 |
| 2374 | 3394 | 4593 | 4613 | 51.5 | 47.6 | 5894 | 4836 | 4817 | 51.2 | 45 | 0.3 | 244 | 75.3 | 44.3 | 41 | 53.2 |
| 2375 | 3395 | 1810 | 1830 | 51.2 | 42.9 | 5895 | 2113 | 2094 | 50.1 | 45 | 1.1 | 304 | 75.5 | 43.4 | 41 | 53 |
| 2376 | 3396 | 17036 | 17058 | 53.5 | 47.8 | 5896 | 17483 | 17465 | 54.4 | 52.6 | 0.9 | 448 | 75.3 | 41.3 | 41 | 53.9 |
| 2377 | 3397 | 1046 | 1064 | 51.2 | 47.4 | 5897 | 1481 | 1463 | 50.5 | 47.4 | 0.6 | 436 | 76.2 | 43.6 | 41 | 53.6 |
| 2378 | 3398 | 9055 | 9079 | 52.8 | 40 | 5898 | 9255 | 9236 | 51.1 | 45 | 1.8 | 201 | 73.5 | 41.3 | 41 | 51.9 |
| 2379 | 3399 | 12976 | 12995 | 51.1 | 45 | 5899 | 13332 | 13312 | 50.9 | 47.6 | 0.2 | 357 | 76.2 | 44.3 | 41 | 53.7 |
| 2380 | 3400 | 8865 | 8884 | 50.4 | 45 | 5900 | 9311 | 9292 | 50.7 | 50 | 0.3 | 447 | 75.4 | 41.4 | 41 | 53 |
| 2381 | 3401 | 25363 | 25381 | 51.1 | 52.6 | 5901 | 25651 | 25632 | 52.7 | 50 | 1.6 | 289 | 74.3 | 40.8 | 41 | 52.5 |
| 2382 | 3402 | 3168 | 3189 | 51 | 45.5 | 5902 | 3504 | 3485 | 50.4 | 45 | 0.6 | 337 | 75.3 | 42.4 | 41 | 52.9 |
| 2383 | 3403 | 25363 | 25381 | 51.1 | 52.6 | 5903 | 25649 | 25629 | 51.5 | 42.9 | 0.3 | 287 | 74.1 | 40.4 | 41 | 52.3 |
| 2384 | 3404 | 29182 | 29202 | 51.2 | 42.9 | 5904 | 29414 | 29395 | 50.5 | 50 | 0.7 | 233 | 75.5 | 45.1 | 41 | 53.1 |
| 2385 | 3405 | 3031 | 3051 | 51.3 | 52.4 | 5905 | 3497 | 3478 | 51.3 | 50 | 0.1 | 467 | 76.3 | 43.5 | 41 | 53.9 |
| 2386 | 3406 | 29172 | 29192 | 51.5 | 42.9 | 5906 | 29412 | 29393 | 50.3 | 45 | 1.1 | 241 | 75.6 | 45.2 | 41 | 53.2 |
| 2387 | 3407 | 12040 | 12057 | 50.6 | 50 | 5907 | 12412 | 12392 | 50 | 42.9 | 0.6 | 373 | 75.9 | 43.4 | 41 | 53.2 |
| 2388 | 3408 | 11543 | 11562 | 50.4 | 40 | 5908 | 12110 | 12090 | 51.1 | 42.9 | 0.7 | 568 | 75.9 | 41.9 | 41 | 53.4 |
| 2389 | 3409 | 16909 | 16928 | 50.8 | 45 | 5909 | 17038 | 17021 | 50.7 | 50 | 0.1 | 130 | 72.7 | 43.8 | 41 | 51.2 |
| 2390 | 3410 | 16909 | 16928 | 50.8 | 45 | 5910 | 17039 | 17022 | 51.4 | 50 | 0.6 | 131 | 72.6 | 43.5 | 41 | 51.2 |
| 2391 | 3411 | 18077 | 18097 | 51.5 | 47.6 | 5911 | 18233 | 18214 | 52 | 50 | 0.5 | 157 | 73.9 | 44.6 | 41 | 52.3 |
| 2392 | 3412 | 18077 | 18097 | 51.5 | 47.6 | 5912 | 18233 | 18215 | 51.3 | 52.6 | 0.2 | 157 | 73.9 | 44.6 | 41 | 52.2 |
| 2393 | 3413 | 9055 | 9079 | 52.8 | 40 | 5913 | 9252 | 9234 | 51.4 | 52.6 | 1.4 | 198 | 73.7 | 41.9 | 41 | 52.1 |
| 2394 | 3414 | 25676 | 25697 | 51.9 | 40.9 | 5914 | 25832 | 25810 | 53.6 | 47.8 | 1.7 | 157 | 72.1 | 40.1 | 41 | 51.1 |
| 2395 | 3415 | 2223 | 2244 | 51.4 | 45.5 | 5915 | 2676 | 2657 | 50.7 | 50 | 0.7 | 454 | 76.9 | 45.2 | 41 | 54.2 |
| 2396 | 3416 | 619 | 640 | 50.4 | 45.5 | 5916 | 1171 | 1153 | 50.4 | 47.4 | 0 | 553 | 77.9 | 46.8 | 41 | 54.7 |
| 2397 | 3417 | 11541 | 11561 | 50.9 | 42.9 | 5917 | 12110 | 12090 | 51.1 | 42.9 | 0.3 | 570 | 75.9 | 41.9 | 41 | 53.5 |
| 2398 | 3418 | 3360 | 3379 | 50.7 | 45 | 5918 | 3497 | 3478 | 51.3 | 50 | 0.6 | 138 | 74 | 46.4 | 42 | 52.1 |
| 2399 | 3419 | 19725 | 19745 | 50 | 42.9 | 5919 | 19921 | 19901 | 50.2 | 47.6 | 0.1 | 197 | 73.5 | 41.6 | 42 | 51.6 |
| 2400 | 3420 | 19720 | 19740 | 51.3 | 42.9 | 5920 | 19921 | 19901 | 50.2 | 47.6 | 1.1 | 202 | 73.4 | 41.1 | 42 | 51.5 |
| 2401 | 3421 | 3360 | 3379 | 50.7 | 45 | 5921 | 3500 | 3481 | 51.2 | 50 | 0.5 | 141 | 74 | 46.1 | 42 | 52.1 |
| 2402 | 3422 | 19717 | 19738 | 50.8 | 40.9 | 5922 | 19921 | 19901 | 50.2 | 47.6 | 0.6 | 205 | 73.4 | 41 | 42 | 51.5 |
| 2403 | 3423 | 24562 | 24580 | 50.1 | 52.6 | 5923 | 25209 | 25190 | 50.6 | 50 | 0.5 | 648 | 76.1 | 42 | 42 | 53.4 |
| 2404 | 3424 | 24559 | 24579 | 52 | 52.4 | 5924 | 24740 | 24717 | 52.5 | 41.7 | 0.5 | 182 | 76 | 48.4 | 42 | 53.9 |
| 2405 | 3425 | 3360 | 3379 | 50.7 | 45 | 5925 | 3504 | 3485 | 50.4 | 45 | 0.3 | 145 | 74.2 | 46.2 | 42 | 52.2 |
| 2406 | 3426 | 19716 | 19737 | 52.2 | 45.5 | 5926 | 19921 | 19900 | 51.8 | 45.5 | 0.4 | 206 | 73.5 | 41.3 | 42 | 52.1 |
| 2407 | 3427 | 3232 | 3251 | 50.3 | 50 | 5927 | 3494 | 3473 | 50.4 | 40.9 | 0.1 | 263 | 74.3 | 41.4 | 42 | 52.2 |
| 2408 | 3428 | 26039 | 26058 | 54 | 55 | 5928 | 26657 | 26636 | 52.6 | 45.5 | 1.5 | 619 | 75.4 | 40.5 | 42 | 53.7 |
| 2409 | 3429 | 3232 | 3251 | 50.3 | 50 | 5929 | 3504 | 3485 | 50.4 | 45 | 0.1 | 273 | 74.6 | 41.8 | 42 | 52.4 |
| 2410 | 3430 | 19715 | 19735 | 52.5 | 47.6 | 5930 | 19921 | 19900 | 51.8 | 45.5 | 0.7 | 207 | 73.7 | 41.5 | 42 | 52.2 |
| 2411 | 3431 | 26039 | 26058 | 54 | 55 | 5931 | 26653 | 26631 | 53.2 | 43.5 | 0.9 | 615 | 75.3 | 40.3 | 42 | 53.8 |
| 2412 | 3432 | 3229 | 3248 | 50.6 | 50 | 5932 | 3494 | 3473 | 50.4 | 40.9 | 0.2 | 266 | 74.3 | 41.4 | 42 | 52.3 |
| 2413 | 3433 | 3229 | 3248 | 50.6 | 50 | 5933 | 3504 | 3485 | 50.4 | 45 | 0.3 | 276 | 74.5 | 41.7 | 42 | 52.4 |
| 2414 | 3434 | 3225 | 3244 | 52.4 | 55 | 5934 | 3495 | 3473 | 51.8 | 43.5 | 0.6 | 271 | 74.7 | 42.1 | 42 | 52.9 |
| 2415 | 3435 | 3222 | 3241 | 52 | 50 | 5935 | 3650 | 3631 | 53.1 | 50 | 1.1 | 429 | 75.5 | 42 | 42 | 53.6 |
| 2416 | 3436 | 24559 | 24579 | 52 | 52.4 | 5936 | 25209 | 25190 | 50.6 | 50 | 1.3 | 651 | 76.1 | 42.1 | 42 | 53.6 |
| 2417 | 3437 | 6158 | 6178 | 51.3 | 42.9 | 5937 | 6289 | 6267 | 52.2 | 43.5 | 0.9 | 132 | 71.3 | 40.2 | 42 | 50.4 |
| 2418 | 3438 | 19709 | 19730 | 51.3 | 40.9 | 5938 | 19917 | 19896 | 50.9 | 45.5 | 0.3 | 209 | 73.7 | 41.6 | 42 | 52 |
| 2419 | 3439 | 3223 | 3241 | 50.2 | 52.6 | 5939 | 3497 | 3478 | 51.3 | 50 | 1.1 | 275 | 74.7 | 42.2 | 42 | 52.5 |
| 2420 | 3440 | 3223 | 3241 | 50.2 | 52.6 | 5940 | 3646 | 3625 | 52 | 40.9 | 1.8 | 424 | 75.4 | 41.7 | 42 | 53 |
| 2421 | 3441 | 3223 | 3241 | 50.2 | 52.6 | 5941 | 3647 | 3628 | 50.6 | 45 | 0.4 | 425 | 75.5 | 41.9 | 42 | 53 |
| 2422 | 3442 | 3217 | 3237 | 51.8 | 47.6 | 5942 | 3650 | 3631 | 53.1 | 50 | 1.3 | 434 | 75.5 | 41.9 | 42 | 53.5 |
| 2423 | 3443 | 9352 | 9372 | 51.3 | 42.9 | 5943 | 10014 | 9996 | 50.7 | 52.6 | 0.6 | 663 | 75.6 | 40.7 | 42 | 53.2 |
| 2424 | 3444 | 23733 | 23752 | 55.6 | 55 | 5944 | 24022 | 24003 | 55.5 | 55 | 0.1 | 290 | 74.5 | 41.4 | 42 | 53.9 |
| 2425 | 3445 | 26040 | 26061 | 56.4 | 54.5 | 5945 | 26661 | 26639 | 55.3 | 47.8 | 1.2 | 622 | 75.5 | 40.7 | 42 | 54.5 |
| 2426 | 3446 | 9918 | 9938 | 51.4 | 47.6 | 5946 | 10608 | 10589 | 51 | 50 | 0.4 | 691 | 75.8 | 41.1 | 42 | 53.4 |
| 2427 | 3447 | 7724 | 7742 | 51.4 | 52.6 | 5947 | 7843 | 7825 | 52.8 | 52.6 | 1.3 | 120 | 70.7 | 40 | 42 | 50 |
| 2428 | 3448 | 26040 | 26061 | 56.4 | 54.5 | 5948 | 26655 | 26631 | 56.2 | 48 | 0.2 | 616 | 75.4 | 40.6 | 42 | 54.8 |
| 2429 | 3449 | 28117 | 28135 | 50.6 | 52.6 | 5949 | 28506 | 28488 | 50.2 | 47.4 | 0.4 | 390 | 79.4 | 51.8 | 42 | 55.8 |
| 2430 | 3450 | 3217 | 3236 | 51.1 | 50 | 5950 | 3497 | 3478 | 51.3 | 50 | 0.2 | 281 | 74.7 | 42 | 42 | 52.7 |
| 2431 | 3451 | 3217 | 3236 | 51.1 | 50 | 5951 | 3500 | 3481 | 51.2 | 50 | 0.1 | 284 | 74.7 | 41.9 | 42 | 52.7 |
| 2432 | 3452 | 3165 | 3187 | 51.6 | 43.5 | 5952 | 3650 | 3631 | 53.1 | 50 | 1.5 | 486 | 75.8 | 42.2 | 42 | 53.6 |
| 2433 | 3453 | 19709 | 19730 | 51.3 | 40.9 | 5953 | 19925 | 19906 | 50.1 | 50 | 1.2 | 217 | 74 | 41.9 | 42 | 51.9 |
| 2434 | 3454 | 9927 | 9945 | 50.8 | 52.6 | 5954 | 10199 | 10180 | 51.5 | 45 | 0.7 | 273 | 75.3 | 43.6 | 42 | 53.1 |
| 2435 | 3455 | 9929 | 9946 | 50 | 50 | 5955 | 10670 | 10649 | 51.3 | 40.9 | 1.3 | 742 | 75.7 | 40.8 | 42 | 53.1 |
| 2436 | 3456 | 19709 | 19730 | 51.3 | 40.9 | 5956 | 19927 | 19908 | 52.1 | 55 | 0.9 | 219 | 74 | 42 | 42 | 52.3 |
| 2437 | 3457 | 9934 | 9953 | 50.7 | 50 | 5957 | 10356 | 10336 | 52.4 | 47.6 | 1.7 | 423 | 75.6 | 42.1 | 42 | 53.2 |
| 2438 | 3458 | 19709 | 19730 | 51.3 | 40.9 | 5958 | 19930 | 19910 | 50.6 | 47.6 | 0.7 | 222 | 74 | 41.9 | 42 | 52.1 |
| 2439 | 3459 | 3164 | 3186 | 51.6 | 43.5 | 5959 | 3650 | 3631 | 53.1 | 50 | 1.5 | 487 | 75.9 | 42.3 | 42 | 53.7 |
| 2440 | 3460 | 3089 | 3110 | 51.8 | 45.5 | 5960 | 3188 | 3166 | 51.6 | 43.5 | 0.2 | 100 | 72 | 46 | 42 | 51 |
| 2441 | 3461 | 18979 | 19000 | 51.6 | 45.5 | 5961 | 19215 | 19194 | 50.2 | 40.9 | 1.4 | 237 | 73.5 | 40.1 | 42 | 51.6 |
| 2442 | 3462 | 26421 | 26441 | 51.5 | 42.9 | 5962 | 26900 | 26882 | 51.5 | 52.6 | 0.1 | 480 | 77.5 | 46.2 | 42 | 54.8 |
| 2443 | 3463 | 26421 | 26441 | 51.5 | 42.9 | 5963 | 26828 | 26810 | 52.9 | 52.6 | 1.4 | 408 | 76.6 | 44.9 | 42 | 54.2 |
| 2444 | 3464 | 11540 | 11557 | 50.4 | 50 | 5964 | 11826 | 11802 | 51.3 | 40 | 0.8 | 287 | 74.4 | 41.1 | 42 | 52.3 |
| 2445 | 3465 | 26421 | 26441 | 51.5 | 42.9 | 5965 | 26695 | 26678 | 50.5 | 50 | 1 | 275 | 74.9 | 42.5 | 42 | 52.7 |
| 2446 | 3466 | 11540 | 11557 | 50.4 | 50 | 5966 | 11819 | 11798 | 50.3 | 40.9 | 0.1 | 280 | 74.3 | 41.1 | 42 | 52.2 |
| 2447 | 3467 | 11540 | 11557 | 50.4 | 50 | 5967 | 11817 | 11797 | 50.4 | 42.9 | 0.1 | 278 | 74.3 | 41 | 42 | 52.2 |
| 2448 | 3468 | 23841 | 23859 | 50.5 | 52.6 | 5968 | 24515 | 24494 | 50.4 | 40.9 | 0.1 | 675 | 76.1 | 41.9 | 42 | 53.5 |
| 2449 | 3469 | 3055 | 3077 | 52.8 | 43.5 | 5969 | 3495 | 3473 | 51.8 | 43.5 | 0.9 | 441 | 76 | 43.1 | 42 | 53.9 |
| 2450 | 3470 | 3795 | 3813 | 52.1 | 52.6 | 5970 | 4565 | 4542 | 53.9 | 41.7 | 1.8 | 771 | 75.6 | 40.3 | 42 | 53.6 |
| 2451 | 3471 | 11540 | 11560 | 53.2 | 47.6 | 5971 | 11984 | 11966 | 53 | 52.6 | 0.2 | 445 | 75.1 | 40.7 | 42 | 53.6 |
| 2452 | 3472 | 11541 | 11561 | 50.9 | 42.9 | 5972 | 12165 | 12147 | 51.2 | 47.4 | 0.4 | 625 | 75.7 | 41.3 | 42 | 53.4 |
| 2453 | 3473 | 3795 | 3815 | 54.6 | 52.4 | 5973 | 4318 | 4294 | 54.4 | 40 | 0.2 | 524 | 75.5 | 41.2 | 42 | 54.3 |
| 2454 | 3474 | 7723 | 7741 | 52.2 | 52.6 | 5974 | 7853 | 7833 | 50.7 | 47.6 | 1.5 | 131 | 71.3 | 40.5 | 42 | 50.2 |
| 2455 | 3475 | 3055 | 3075 | 51.8 | 47.6 | 5975 | 3504 | 3485 | 50.4 | 45 | 1.4 | 450 | 76.1 | 43.1 | 42 | 53.5 |
| 2456 | 3476 | 3055 | 3074 | 51.1 | 50 | 5976 | 3494 | 3473 | 50.4 | 40.9 | 0.7 | 440 | 76 | 43 | 42 | 53.4 |
| 2457 | 3477 | 26421 | 26441 | 51.5 | 42.9 | 5977 | 26651 | 26631 | 50.2 | 42.9 | 1.3 | 231 | 73.8 | 41.1 | 42 | 51.8 |
| 2458 | 3478 | 28109 | 28130 | 50.2 | 40.9 | 5978 | 28672 | 28654 | 50.6 | 52.6 | 0.4 | 564 | 79.9 | 51.6 | 42 | 56.1 |
| 2459 | 3479 | 3055 | 3074 | 51.1 | 50 | 5979 | 3504 | 3485 | 50.4 | 45 | 0.7 | 450 | 76.1 | 43.1 | 42 | 53.5 |
| 2460 | 3480 | 12232 | 12250 | 51.9 | 52.6 | 5980 | 12412 | 12392 | 50 | 42.9 | 1.9 | 181 | 73.2 | 41.4 | 42 | 51.3 |
| 2461 | 3481 | 3034 | 3053 | 50.3 | 50 | 5981 | 3210 | 3190 | 50.5 | 47.6 | 0.2 | 177 | 74.9 | 45.8 | 42 | 52.6 |
| 2462 | 3482 | 3034 | 3053 | 50.3 | 50 | 5982 | 3494 | 3473 | 50.4 | 40.9 | 0.1 | 461 | 76.1 | 43.2 | 42 | 53.5 |
| 2463 | 3483 | 3034 | 3053 | 50.3 | 50 | 5983 | 3504 | 3485 | 50.4 | 45 | 0.1 | 471 | 76.2 | 43.3 | 42 | 53.5 |
| 2464 | 3484 | 12236 | 12256 | 51.2 | 42.9 | 5984 | 12498 | 12480 | 50 | 47.4 | 1.1 | 263 | 74.6 | 42.2 | 42 | 52.4 |
| 2465 | 3485 | 12352 | 12375 | 52.9 | 41.7 | 5985 | 12724 | 12705 | 52.4 | 55 | 0.5 | 373 | 75.7 | 42.9 | 42 | 53.8 |
| 2466 | 3486 | 26421 | 26441 | 51.5 | 42.9 | 5986 | 26585 | 26567 | 51 | 47.4 | 0.5 | 165 | 72.2 | 40 | 42 | 50.9 |
| 2467 | 3487 | 3031 | 3051 | 51.3 | 52.4 | 5987 | 3503 | 3484 | 51.5 | 50 | 0.1 | 473 | 76.3 | 43.6 | 42 | 53.9 |
| 2468 | 3488 | 18704 | 18724 | 50.8 | 47.6 | 5988 | 19480 | 19459 | 50.3 | 40.9 | 0.4 | 777 | 75.5 | 40.2 | 42 | 53.1 |
| 2469 | 3489 | 3016 | 3036 | 50.2 | 42.9 | 5989 | 3646 | 3625 | 52 | 40.9 | 1.8 | 631 | 76.4 | 42.8 | 42 | 53.6 |
| 2470 | 3490 | 2823 | 2844 | 50.4 | 45.5 | 5990 | 3053 | 3034 | 50.3 | 50 | 0.2 | 231 | 74 | 41.6 | 42 | 52 |
| 2471 | 3491 | 12366 | 12384 | 51.7 | 52.6 | 5991 | 12994 | 12976 | 50.3 | 47.4 | 1.3 | 629 | 76.4 | 42.9 | 42 | 53.7 |
| 2472 | 3492 | 12366 | 12384 | 51.7 | 52.6 | 5992 | 12992 | 12974 | 51.2 | 52.6 | 0.5 | 627 | 76.5 | 43.1 | 42 | 54 |
| 2473 | 3493 | 2823 | 2844 | 50.4 | 45.5 | 5993 | 3056 | 3037 | 52.1 | 55 | 1.6 | 234 | 74.2 | 41.9 | 42 | 52.2 |
| 2474 | 3494 | 2522 | 2541 | 51.4 | 45 | 5994 | 2672 | 2654 | 50.9 | 52.6 | 0.5 | 151 | 75.3 | 48.3 | 42 | 53 |
| 2475 | 3495 | 2522 | 2541 | 51.4 | 45 | 5995 | 2675 | 2656 | 50.4 | 50 | 1 | 154 | 75.2 | 48.1 | 42 | 52.9 |
| 2476 | 3496 | 2429 | 2447 | 50.2 | 47.4 | 5996 | 3056 | 3037 | 52.1 | 55 | 1.9 | 628 | 76.3 | 42.7 | 42 | 53.6 |
| 2477 | 3497 | 2429 | 2447 | 50.2 | 47.4 | 5997 | 3190 | 3169 | 50.7 | 45.5 | 0.5 | 762 | 76.6 | 42.9 | 42 | 53.8 |
| 2478 | 3498 | 27436 | 27455 | 52.7 | 45 | 5998 | 27541 | 27521 | 51.7 | 47.6 | 1 | 106 | 72.1 | 45.3 | 42 | 51.1 |
| 2479 | 3499 | 2429 | 2447 | 50.2 | 47.4 | 5999 | 3192 | 3171 | 51.9 | 50 | 1.7 | 764 | 76.7 | 43.1 | 42 | 53.8 |
| 2480 | 3500 | 2427 | 2445 | 52.1 | 52.6 | 6000 | 3056 | 3037 | 52.1 | 55 | 0 | 630 | 76.4 | 42.9 | 42 | 54.2 |
| 2481 | 3501 | 27389 | 27407 | 50.6 | 47.4 | 6001 | 27541 | 27521 | 51.7 | 47.6 | 1.1 | 153 | 73.2 | 43.1 | 42 | 51.5 |
| 2482 | 3502 | 2427 | 2445 | 52.1 | 52.6 | 6002 | 3190 | 3169 | 50.7 | 45.5 | 1.4 | 764 | 76.7 | 43.1 | 42 | 54 |
| 2483 | 3503 | 18616 | 18636 | 51.4 | 47.6 | 6003 | 19316 | 19295 | 50 | 40.9 | 1.4 | 701 | 75.4 | 40.2 | 42 | 52.9 |
| 2484 | 3504 | 2377 | 2395 | 52.4 | 52.6 | 6004 | 2672 | 2653 | 51.6 | 50 | 0.8 | 296 | 77 | 47.3 | 42 | 54.5 |
| 2485 | 3505 | 18591 | 18611 | 51.7 | 42.9 | 6005 | 19216 | 19195 | 50.2 | 40.9 | 1.4 | 626 | 75.7 | 41.1 | 42 | 53.1 |
| 2486 | 3506 | 12366 | 12384 | 51.7 | 52.6 | 6006 | 12739 | 12718 | 51 | 40.9 | 0.7 | 374 | 75.6 | 42.8 | 42 | 53.3 |
| 2487 | 3507 | 2377 | 2395 | 52.4 | 52.6 | 6007 | 2672 | 2654 | 50.9 | 52.6 | 1.5 | 296 | 77 | 47.3 | 42 | 54.3 |
| 2488 | 3508 | 16982 | 17001 | 51.2 | 55 | 6008 | 17111 | 17090 | 51.1 | 40.9 | 0.1 | 130 | 74.6 | 48.5 | 42 | 52.6 |
| 2489 | 3509 | 2377 | 2395 | 52.4 | 52.6 | 6009 | 2675 | 2656 | 50.4 | 50 | 2 | 299 | 77 | 47.2 | 42 | 54.1 |
| 2490 | 3510 | 18590 | 18608 | 50.6 | 42.1 | 6010 | 19216 | 19195 | 50.2 | 40.9 | 0.3 | 627 | 75.6 | 41 | 42 | 53.1 |
| 2491 | 3511 | 2377 | 2395 | 52.4 | 52.6 | 6011 | 2891 | 2873 | 50.8 | 47.4 | 1.6 | 515 | 76.8 | 44.5 | 42 | 54.1 |
| 2492 | 3512 | 8220 | 8240 | 54 | 47.6 | 6012 | 8935 | 8917 | 54.5 | 52.6 | 0.4 | 716 | 75.4 | 40.1 | 42 | 54.1 |
| 2493 | 3513 | 12370 | 12388 | 50.1 | 47.4 | 6013 | 12998 | 12979 | 50.1 | 45 | 0.1 | 629 | 76.4 | 42.9 | 42 | 53.6 |
| 2494 | 3514 | 2223 | 2244 | 51.4 | 45.5 | 6014 | 2675 | 2656 | 50.4 | 50 | 1 | 453 | 77 | 45.3 | 42 | 54.1 |
| 2495 | 3515 | 2220 | 2239 | 51.3 | 45 | 6015 | 2672 | 2654 | 50.9 | 52.6 | 0.4 | 453 | 77 | 45.3 | 42 | 54.2 |
| 2496 | 3516 | 24418 | 24439 | 52.9 | 45.5 | 6016 | 24936 | 24919 | 51.8 | 50 | 1.1 | 519 | 76 | 42.4 | 42 | 53.8 |
| 2497 | 3517 | 18586 | 18603 | 50.4 | 44.4 | 6017 | 19216 | 19195 | 50.2 | 40.9 | 0.2 | 631 | 75.6 | 40.9 | 42 | 53.1 |
| 2498 | 3518 | 2220 | 2239 | 51.3 | 45 | 6018 | 2675 | 2656 | 50.4 | 50 | 0.8 | 456 | 76.9 | 45.2 | 42 | 54.1 |
| 2499 | 3519 | 1402 | 1422 | 50.2 | 42.9 | 6019 | 2153 | 2134 | 50.4 | 45 | 0.2 | 752 | 76.7 | 43.1 | 42 | 53.8 |
| 2500 | 3520 | 1356 | 1375 | 53.8 | 55 | 6020 | 2153 | 2133 | 52.1 | 42.9 | 1.7 | 798 | 76.9 | 43.5 | 42 | 54.5 |

[1664] TABLE 5
Primers

| | | | | T_{M} | | Product |
|---|---|---|---|---|---|---|
| Forward primer SEQ | | Reverse primer SEQ | | (FOR & REV) | | length |
| ID NO & Co-ordinates | | ID NO & Co-ordinates | | (° C.) | | (bp) |
| 6076 | 1-19 | 6171 | 199-183 | 50.1 | 50.3 | 199 |
| 6077 | 149-169 | 6172 | 334-315 | 51.5 | 52.4 | 186 |
| 6078 | 292-310 | 6173 | 560-541 | 50.8 | 51.1 | 269 |
| 6079 | 598-619 | 6174 | 749-731 | 52.6 | 50.6 | 152 |
| 6080 | 721-742 | 6175 | 930-912 | 50.4 | 50.3 | 210 |
| 6081 | 888-912 | 6176 | 1077-1058 | 52.8 | 51.2 | 190 |
| 6082 | 984-1003 | 6177 | 1149-1131 | 51.1 | 51.1 | 166 |
| 6083 | 1157-1175 | 6178 | 1479-1460 | 50.9 | 51.6 | 323 |
| 6084 | 1420-1441 | 6179 | 1700-1680 | 51.2 | 50.7 | 281 |
| 6085 | 1685-1707 | 6180 | 1834-1811 | 53.8 | 53.7 | 150 |
| 6086 | 1740-1764 | 6181 | 1987-1963 | 53.4 | 52.2 | 248 |
| 6087 | 2007-2025 | 6182 | 2251-2232 | 50.3 | 50.1 | 245 |
| 6088 | 2226-2245 | 6183 | 2385-2366 | 50.4 | 50.1 | 160 |
| 6089 | 2428-2446 | 6184 | 2749-2728 | 50.1 | 50.3 | 322 |
| 6090 | 2742-2763 | 6185 | 2893-2875 | 50.6 | 51.4 | 152 |
| 6091 | 2823-2844 | 6186 | 3082-3058 | 50.4 | 52.3 | 260 |
| 6092 | 3007-3031 | 6187 | 3185-3164 | 51.9 | 51.0 | 179 |
| 6093 | 3234-3254 | 6188 | 3497-3478 | 51.1 | 51.3 | 264 |
| 6094 | 3453-3476 | 6189 | 3647-3627 | 51.8 | 52.1 | 195 |
| 6095 | 3601-3622 | 6190 | 3877-3853 | 52.5 | 53.6 | 277 |
| 6096 | 4007-4027 | 6191 | 4158-4135 | 51.1 | 51.4 | 152 |
| 6097 | 4141-4165 | 6192 | 4316-4295 | 51.3 | 50.8 | 176 |
| 6098 | 4366-4387 | 6193 | 4567-4544 | 54.6 | 55.4 | 202 |
| 6099 | 4488-4508 | 6194 | 4708-4690 | 50.7 | 50.3 | 221 |
| 6100 | 4658-4677 | 6195 | 4994-4974 | 50.5 | 51.2 | 337 |
| 6101 | 4902-4922 | 6196 | 5115-5092 | 50.5 | 51.4 | 214 |
| 6102 | 5239-5260 | 6197 | 5450-5430 | 50.8 | 50.9 | 212 |
| 6103 | 5366-5389 | 6198 | 5560-5542 | 50.5 | 51.8 | 195 |
| 6104 | 5593-5612 | 6199 | 5860-5836 | 50.8 | 51.6 | 268 |
| 6105 | 6042-6062 | 6200 | 6291-6271 | 50.4 | 51.1 | 250 |
| 6106 | 6271-6291 | 6201 | 6483-6463 | 51.1 | 50.2 | 213 |
| 6107 | 7017-7040 | 6202 | 7171-7153 | 52.4 | 52.8 | 155 |
| 6108 | 7253-7272 | 6203 | 7504-7486 | 50.3 | 50.3 | 252 |
| 6109 | 7415-7434 | 6204 | 7677-7654 | 54.5 | 53.6 | 263 |
| 6110 | 7615-7635 | 6205 | 7821-7798 | 51.1 | 52.8 | 207 |
| 6111 | 7728-7746 | 6206 | 7936-7915 | 51.7 | 50.1 | 209 |
| 6112 | 7845-7867 | 6207 | 7994-7970 | 52.7 | 53.4 | 150 |
| 6113 | 8011-8029 | 6208 | 8189-8170 | 51.4 | 50.6 | 179 |
| 6114 | 8143-8166 | 6209 | 8300-8281 | 52.2 | 50.8 | 158 |
| 6115 | 8221-8239 | 6210 | 8388-8369 | 51.0 | 51.1 | 168 |
| 6116 | 8553-8575 | 6211 | 8931-8915 | 51.8 | 50.3 | 379 |
| 6117 | 8867-8886 | 6212 | 9254-9236 | 50.7 | 50.6 | 388 |
| 6118 | 9244-9267 | 6213 | 9597-9573 | 51.9 | 53.4 | 354 |
| 6119 | 9620-9640 | 6214 | 9990-9969 | 51.3 | 51.3 | 371 |
| 6120 | 10009-10027 | 6215 | 10188-10171 | 50.2 | 50.2 | 180 |
| 6121 | 10093-10113 | 6216 | 10244-10223 | 52.4 | 50.6 | 152 |
| 6122 | 10242-10265 | 6217 | 10608-10589 | 51.2 | 51.0 | 367 |
| 6123 | 10549-10571 | 6218 | 10783-10763 | 53.7 | 55.2 | 235 |
| 6124 | 10766-10785 | 6219 | 10930-10912 | 52.0 | 51.1 | 165 |
| 6125 | 11065-11085 | 6220 | 11305-11287 | 50.7 | 50.0 | 241 |
| 6126 | 11265-11287 | 6221 | 11429-11405 | 54.5 | 53.5 | 165 |
| 6127 | 11552-11571 | 6222 | 11730-11709 | 52.0 | 50.4 | 179 |
| 6128 | 11705-11726 | 6223 | 11869-11848 | 50.1 | 50.2 | 165 |
| 6129 | 11801-11824 | 6224 | 11984-11967 | 51.5 | 50.4 | 184 |
| 6130 | 12040-12058 | 6225 | 12254-12235 | 52.3 | 51.9 | 215 |
| 6131 | 12235-12253 | 6226 | 12406-12388 | 50.1 | 50.1 | 172 |
| 6132 | 12366-12384 | 6227 | 12730-12712 | 51.7 | 52.2 | 365 |
| 6133 | 12727-12748 | 6228 | 12994-12976 | 50.8 | 50.3 | 268 |
| 6134 | 12948-12966 | 6229 | 13224-13201 | 50.7 | 51.7 | 277 |
| 6135 | 13175-13196 | 6230 | 13324-13300 | 54.3 | 55.1 | 150 |
| 6136 | 13237-13258 | 6231 | 13545-13526 | 52.9 | 52.9 | 309 |
| 6137 | 13790-13810 | 6232 | 13963-13945 | 50.9 | 50.7 | 174 |
| 6138 | 14080-14098 | 6233 | 14280-14257 | 51.5 | 51.0 | 201 |
| 6139 | 14405-14427 | 6234 | 14561-14540 | 50.2 | 50.9 | 157 |
| 6140 | 14882-14906 | 6235 | 15046-15024 | 50.9 | 51.5 | 165 |
| 6141 | 14951-14976 | 6236 | 15145-15124 | 53.1 | 52.9 | 195 |
| 6142 | 15113-15134 | 6237 | 15275-15257 | 51.6 | 50.8 | 163 |
| 6143 | 15211-15230 | 6238 | 15383-15363 | 50.2 | 50.1 | 173 |
| 6144 | 15364-15387 | 6239 | 15528-15506 | 54.0 | 52.1 | 165 |
| 6145 | 15456-15477 | 6240 | 15605-15585 | 52.0 | 53.2 | 150 |
| 6146 | 15513-15532 | 6241 | 15897-15876 | 51.2 | 50.4 | 385 |
| 6147 | 15837-15856 | 6242 | 15999-15978 | 52.3 | 50.8 | 163 |
| 6148 | 16073-16096 | 6243 | 16301-16277 | 51.7 | 52.8 | 229 |
| 6149 | 16245-16266 | 6244 | 16404-16380 | 50.3 | 52.0 | 160 |
| 6150 | 16366-16385 | 6245 | 16515-16492 | 52.9 | 53.8 | 150 |
| 6151 | 16553-16571 | 6246 | 16777-16758 | 53.4 | 51.5 | 225 |
| 6152 | 16832-16852 | 6247 | 17026-17004 | 51.0 | 51.6 | 195 |
| 6153 | 16982-17001 | 6248 | 17359-17340 | 51.2 | 50.2 | 378 |
| 6154 | 17354-17372 | 6249 | 17511-17490 | 51.3 | 50.4 | 158 |
| 6155 | 17422-17443 | 6250 | 17573-17552 | 50.2 | 51.1 | 152 |
| 6156 | 17603-17623 | 6251 | 17769-17748 | 50.7 | 51.5 | 167 |
| 6157 | 17728-17746 | 6252 | 17883-17862 | 50.9 | 51.2 | 156 |
| 6158 | 18011-18030 | 6253 | 18163-18140 | 52.9 | 51.9 | 153 |
| 6159 | 18076-18098 | 6254 | 18225-18205 | 54.4 | 55.0 | 150 |
| 6160 | 18270-18292 | 6255 | 18432-18413 | 51.9 | 51.4 | 163 |
| 6161 | 18352-18373 | 6256 | 18648-18629 | 51.3 | 50.8 | 297 |
| 6162 | 18550-18571 | 6257 | 18702-18684 | 50.4 | 51.9 | 153 |
| 6163 | 18720-18738 | 6258 | 19004-18983 | 50.6 | 51.0 | 285 |
| 6164 | 18960-18981 | 6259 | 19109-19085 | 54.7 | 54.3 | 150 |
| 6165 | 19065-19089 | 6260 | 19217-19195 | 52.8 | 51.7 | 153 |
| 6166 | 19310-19329 | 6261 | 19476-19454 | 50.2 | 52.1 | 167 |
| 6167 | 19569-19589 | 6262 | 19719-19701 | 50.5 | 51.8 | 151 |
| 6168 | 19707-19731 | 6263 | 19856-19833 | 55.7 | 55.9 | 150 |
| 6169 | 19771-19792 | 6264 | 19921-19901 | 50.1 | 50.2 | 151 |
| 6170 | 19833-19851 | 6265 | 19986-19966 | 50.9 | 50.7 | 154 |

[1665] TABLE 6
Primers

| | | | | T_{M} | | Product |
|---|---|---|---|---|---|---|
| Forward primer SEQ | | Reverse primer SEQ | | (FOR & REV) | | length |
| ID NO & Co-ordinates | | ID NO & Co-ordinates | | (° C.) | | (bp) |
| 6266 | 20110-20132 | 6305 | 20425-20404 | 51.9 | 50.9 | 316 |
| 6267 | 20468-20492 | 6306 | 20617-20596 | 53.2 | 53.5 | 150 |
| 6268 | 20557-20578 | 6307 | 20891-20871 | 50.4 | 50.6 | 335 |
| 6269 | 20838-20856 | 6308 | 21037-21015 | 52.5 | 52.0 | 200 |
| 6270 | 21096-21116 | 6309 | 21295-21272 | 50.1 | 51.7 | 200 |
| 6271 | 22173-22194 | 6310 | 22414-22395 | 52.4 | 51.0 | 242 |
| 6272 | 22320-22342 | 6311 | 22501-22479 | 54.8 | 54.3 | 182 |
| 6273 | 22532-22552 | 6312 | 22695-22675 | 50.6 | 50.0 | 164 |
| 6274 | 22712-22736 | 6313 | 22873-22852 | 56.7 | 55.5 | 162 |
| 6275 | 22842-22861 | 6314 | 23086-23067 | 51.0 | 52.8 | 245 |
| 6276 | 23151-23170 | 6315 | 23395-23376 | 51.4 | 50.3 | 245 |
| 6277 | 23307-23326 | 6316 | 23524-23501 | 51.1 | 51.1 | 218 |
| 6278 | 23615-23635 | 6317 | 23776-23758 | 50.7 | 50.2 | 162 |
| 6279 | 23838-23857 | 6318 | 23996-23977 | 50.4 | 50.6 | 159 |
| 6280 | 24030-24051 | 6319 | 24407-24386 | 57.6 | 55.7 | 378 |
| 6281 | 24388-24407 | 6320 | 24581-24563 | 50.4 | 50.1 | 194 |
| 6282 | 24559-24579 | 6321 | 24938-24921 | 52.0 | 50.4 | 380 |
| 6283 | 24922-24941 | 6322 | 25184-25166 | 50.1 | 51.2 | 263 |
| 6284 | 25201-25220 | 6323 | 25400-25382 | 51.1 | 51.4 | 200 |
| 6285 | 25363-25381 | 6324 | 25646-25627 | 51.1 | 50.5 | 284 |
| 6286 | 25656-25681 | 6325 | 25839-25814 | 54.5 | 56.4 | 184 |
| 6287 | 25761-25782 | 6326 | 25982-25961 | 54.6 | 54.3 | 222 |
| 6288 | 26039-26058 | 6327 | 26189-26166 | 54.0 | 53.0 | 151 |
| 6289 | 26184-26205 | 6328 | 26333-26310 | 50.9 | 51.8 | 150 |
| 6290 | 26422-26442 | 6329 | 26660-26641 | 51.3 | 50.2 | 239 |
| 6291 | 26571-26589 | 6330 | 26739-26715 | 51.7 | 53.2 | 169 |
| 6292 | 26733-26752 | 6331 | 26960-26941 | 51.1 | 52.2 | 228 |
| 6293 | 26866-26885 | 6332 | 27139-27117 | 50.7 | 51.9 | 274 |
| 6294 | 27300-27321 | 6333 | 27458-27439 | 51.2 | 50.2 | 159 |
| 6295 | 27361-27380 | 6334 | 27579-27558 | 52.4 | 51.1 | 219 |
| 6296 | 27718-27740 | 6335 | 27917-27901 | 50.7 | 50.0 | 200 |
| 6297 | 28041-28059 | 6336 | 28207-28189 | 50.8 | 50.8 | 167 |
| 6298 | 28166-28189 | 6337 | 28411-28393 | 52.2 | 52.9 | 246 |
| 6299 | 28395-28414 | 6338 | 28671-28653 | 51.5 | 50.2 | 277 |
| 6300 | 28654-28672 | 6339 | 28821-28800 | 50.6 | 52.3 | 168 |
| 6301 | 28867-28885 | 6340 | 29184-29166 | 51.5 | 51.6 | 318 |
| 6302 | 29183-29204 | 6341 | 29360-29342 | 50.4 | 50.4 | 178 |
| 6303 | 29262-29279 | 6342 | 29626-29606 | 50.1 | 50.2 | 365 |
| 6304 | 29538-29559 | 6343 | 29690-29670 | 50.0 | 50.4 | 153 |

[1666] TABLE 7
Primers

| Name | SEQ ID NO: | Co-ordinates |
|---|---|---|
| AB4f | 6344 | 19869-19888 |
| AB5f | 6345 | 20238-20257 |
| BC1f | 6346 | 20581-20600 |
| BC2f | 6347 | 20950-20969 |
| BC3f | 6348 | 21339-21358 |
| BC4f | 6349 | 21708-21727 |
| BC5f | 6350 | 22041-22060 |
| BC6f | 6351 | 22410-22429 |
| BC7f | 6352 | 22759-22778 |
| BC8f | 6353 | 23131-23150 |
| BC9f | 6354 | 23500-23519 |
| BC10f | 6355 | 23841-23860 |
| BC11f | 6356 | 24210-24229 |
| BC12f | 6357 | 24560-24579 |
| BC13f | 6358 | 24941-24960 |
| BC14f | 6359 | 25310-25329 |
| BC15f | 6360 | 25675-25694 |
| BC16f | 6361 | 26044-26063 |
| BC17f | 6362 | 26413-26432 |
| BC18f | 6363 | 26763-26782 |
| BC19f | 6364 | 27132-27151 |
| BC20f | 6365 | 27491-27510 |
| BC21f | 6366 | 27845-27864 |
| CB1r | 6367 | 28011-28030 |
| CB2r | 6368 | 27671-27690 |
| CB3r | 6369 | 27301-27320 |
| CB4r | 6370 | 26931-26950 |
| CB5r | 6371 | 26575-26594 |
| CB6r | 6372 | 26191-26210 |
| CB7r | 6373 | 25841-25860 |
| CB8r | 6374 | 25476-25495 |
| CB9r | 6375 | 25126-25145 |
| CB10r | 6376 | 24791-24810 |
| CB11r | 6377 | 24422-24441 |
| CB12r | 6378 | 24031-24050 |
| CB13r | 6379 | 23673-23692 |
| CB14r | 6380 | 23298-23317 |
| CB15r | 6381 | 22928-22947 |
| CB16r | 6382 | 22567-22586 |
| CB17r | 6383 | 22196-22215 |
| CB18r | 6384 | 21831-21850 |
| CB19r | 6385 | 21431-21450 |
| CB20r | 6386 | 21073-21092 |
| CB21r | 6387 | 20715-20734 |
| BA1r | 6388 | 20345-20364 |
| BA2r | 6389 | 19969-19988 |
| BA3r | 6390 | 19599-19618 |
| BA4r | 6391 | 19228-19247 |
| BA5r | 6392 | 18852-18871 |

[1667] TABLE 8
Primers

| | | |
|---|---|---|
| Name | SEQ ID NO | Co-ordinates |

| | | |
|---|---|---|
| F1 | 6393 | 1-19 |
| F2 | 6394 | 292-310 |
| F3 | 6395 | 721-742 |
| F4 | 6396 | 984-1003 |
| F5 | 6397 | 1420-1441 |
| F6 | 6398 | 1740-1764 |
| F7 | 6399 | 2226-2245 |
| F8 | 6400 | 2742-2763 |
| F9 | 6401 | 3007-3031 |
| F10 | 6402 | 3453-3476 |
| F11 | 6403 | 4007-4027 |
| F12 | 6404 | 4366-4387 |
| F13 | 6405 | 4658-4677 |
| F14 | 6406 | 5239-5260 |
| F15 | 6407 | 5593-5612 |
| F16 | 6408 | 6271-6291 |
| F17 | 6409 | 7253-7272 |
| F18 | 6410 | 7615-7635 |
| F19 | 6411 | 7845-7867 |
| F20 | 6412 | 8143-8166 |
| F21 | 6413 | 8553-8575 |
| F22 | 6414 | 9244-9267 |
| F23 | 6415 | 10009-10027 |
| F24 | 6416 | 10242-10265 |
| F25 | 6417 | 10766-10785 |
| F26 | 6418 | 11265-11287 |
| F27 | 6419 | 11705-11726 |
| F28 | 6420 | 12040-12058 |
| F29 | 6421 | 12366-12384 |
| F30 | 6422 | 12948-12966 |
| F31 | 6423 | 13237-13258 |
| F32 | 6424 | 14080-14098 |
| F33 | 6425 | 14882-14906 |
| F34 | 6426 | 15113-15134 |
| F35 | 6427 | 15364-15387 |
| F36 | 6428 | 15513-15532 |
| F37 | 6429 | 16073-16096 |
| F38 | 6430 | 16366-16385 |
| F39 | 6431 | 16832-16852 |
| F40 | 6432 | 17354-17372 |
| F41 | 6433 | 17603-17623 |
| F42 | 6434 | 18011-18030 |
| F43 | 6435 | 18270-18292 |
| F44 | 6436 | 18550-18571 |
| F45 | 6437 | 18960-18981 |
| F46 | 6438 | 19310-19329 |
| F47 | 6439 | 19707-19731 |
| F48 | 6440 | 19833-19851 |
| R1 | 6441 | 334-315 |
| R2 | 6442 | 749-731 |
| R3 | 6443 | 1077-1058 |
| R4 | 6444 | 1479-1460 |
| R5 | 6445 | 1834-1811 |
| R6 | 6446 | 2251-2232 |
| R7 | 6447 | 2749-2728 |
| R8 | 6448 | 3082-3058 |
| R9 | 6449 | 3497-3478 |
| R10 | 6450 | 3877-3853 |
| R11 | 6451 | 4316-4295 |
| R12 | 6452 | 4708-4690 |
| R13 | 6453 | 5115-5092 |
| R14 | 6454 | 5560-5542 |
| R15 | 6455 | 6291-6271 |
| R16 | 6456 | 7171-7153 |
| R17 | 6457 | 7677-7654 |
| R18 | 6458 | 7936-7915 |
| R19 | 6459 | 8189-8170 |
| R20 | 6460 | 8388-8369 |
| R21 | 6461 | 9254-9236 |
| R22 | 6462 | 9990-9969 |
| R23 | 6463 | 10244-10223 |
| R24 | 6464 | 10783-10763 |
| R25 | 6465 | 11305-11287 |
| R26 | 6466 | 11730-11709 |
| R27 | 6467 | 11984-11967 |
| R28 | 6468 | 12406-12388 |
| R29 | 6469 | 12994-12976 |
| R30 | 6470 | 13324-13300 |
| R31 | 6471 | 13963-13945 |
| R32 | 6472 | 14561-14540 |
| R33 | 6473 | 15145-15124 |
| R34 | 6474 | 15383-15363 |
| R35 | 6475 | 15605-15585 |
| R36 | 6476 | 15999-15978 |
| R37 | 6477 | 16404-16380 |
| R38 | 6478 | 16777-16758 |
| R39 | 6479 | 17359-17340 |
| R40 | 6480 | 17573-17552 |
| R41 | 6481 | 17883-17862 |
| R42 | 6482 | 18225-18205 |
| R43 | 6483 | 18648-18629 |
| R44 | 6484 | 19004-18983 |
| R45 | 6485 | 19217-19195 |
| R46 | 6486 | 19719-19701 |
| R47 | 6487 | 19921-19901 |

[1668] TABLE 9
Primers

| | Name | SEQ ID NO: |
|---|---|---|
| 1 | CB12R | 6488 |
| 2 | R0010 | 6489 |
| 3 | R0011 | 6490 |
| 4 | R0012 | 6491 |
| 5 | BNI-ED | 6492 |
| 6 | BNI-EU | 6493 |
| 7 | SAR1S-U | 6494 |
| 8 | SAR1As-D | 6495 |
| 9 | SAR1S | 6496 |
| 10 | SAR1As | 6497 |
| 11 | IN2-U | 6498 |
| 12 | IN4-D | 6499 |
| 13 | IN-2 | 6500 |
| 14 | IN-4 | 6501 |
| 15 | IN-6 | 6502 |
| 16 | IN-7 | 6503 |
| 17 | COR1-U | 6504 |
| 18 | COR2-D | 6505 |
| 19 | COR-1 | 6506 |
| 20 | COR-2 | 6507 |
| 21 | HKUF-U | 6508 |
| 22 | HKUR-D | 6509 |
| 23 | HKU-F | 6510 |
| 24 | HKU-R | 6511 |
| 25 | 1451-D | 6512 |
| 26 | 1451-U | 6513 |
| 27 | 690-D | 6514 |
| 28 | 690-U | 6515 |
| 29 | 690-D2 | 6516 |
| 30 | 690-U2 | 6517 |
| 31 | EMC7-D | 6518 |
| 32 | EMC7-U | 6519 |
| 33 | EMC7-D2 | 6520 |
| 34 | EMC7-U2 | 6521 |
| 35 | EMC8-D | 6522 |
| 36 | EMC8-U | 6523 |
| 37 | EMC8-D2 | 6524 |
| 38 | EMC8-U2 | 6525 |
| 39 | EMC11-D | 6526 |
| 40 | EMC11-U | 6527 |
| 41 | ORF1B-D | 6528 |
| 42 | ORF1B-U | 6529 |
| 43 | ORFS-D | 6530 |
| 44 | ORES-U | 6531 |
| 45 | E7-717F | 6532 |
| 46 | E8-85R | 6533 |
| 47 | E8-307F | 6534 |
| 48 | E11-771F | 6535 |
| 49 | E11-96R | 6536 |
| 50 | CON1-F | 6537 |
| 51 | CON1-U | 6538 |
| 52 | CON2-F | 6539 |
| 53 | CON2-R | 6540 |
| 54 | CON3-F | 6541 |
| 55 | CON3-R | 6542 |
| 56 | 15-F | 6543 |
| 57 | 15-R | 6544 |
| 58 | 15-F2 | 6545 |
| 59 | 15-R2 | 6546 |
| 60 | 13-F | 6547 |
| 61 | 13-R | 6548 |
| 62 | 13-F2 | 6549 |
| 63 | 13-R2 | 6550 |
| 64 | CONTIG-F | 6551 |
| 65 | QT3-R | 6552 |
| 66 | QT3-F | 6553 |
| 67 | QIN-R | 6554 |
| 68 | QIN-F | 6555 |
| 69 | AB1-F | 6556 |
| 70 | AB2-F | 6557 |
| 71 | AB3-F | 6558 |
| 72 | AB1-R | 6559 |

[1669] TABLE 10
Features of the predicted proteins and open reading frames of the SARS virus

| | SARS ORF | Length | | Cleavage | | |
|---|---|---|---|---|---|---|
| | (SEQ ID NO) | (aa) | Role | site | Features | Cons^{d*} |
| ORF1a | P28 (9766) | 179 | Leader protein | 179 (G/G)^{#} | | + |
| | P65 (9767) | 639 | Homologue of MHV p65 | 818 (G/A) | | + |
| | | | cleavage product | | | |
| | Nsp1 | 2422^{##} | Papain like protease, | 3240 (Q/S) | phosphoesterase domain | + |
| | (9768) | | cleaves the first two | | Zn binding domain | |
| | | | proteins | | | |
| | Nsp2 | 306 | 3C-like protease, cleaves | 3546 (Q/G) | | + |
| | (9769) | | proteins nsp1-nsp12 | | | |
| | Nsp3 (9770) | 290 | ? | 3836 (Q/S) | 5 TMDs | + |
| | Nsp4 (9771) | 83 | ? | 3919 (Q/A) | 1 TMD | + |
| | Nsp5 (9772) | 198 | ? | 4117 (Q/N) | | + |
| | Nsp6 (9773) | 113 | ? | 4230 (Q/A) | | + |
| | Nsp7 (9774) | 139 | ? | 4369 (Q/S) | Putative growth factor-like motif | + |
| ORF1b | Nsp9 (9775) | 932 | RNA polymerase | 5298 (Q/A) | | + |
| | Nsp10 (9776) | 601 | Putative helicase | 5899 (Q/A) | Metal binding domain, | + |
| | | | Tanner et al. (2003) J Biol Chem | | ATP/GTP binding domain | |
| | | | 278: 39578-82 | | | |
| | Nsp11 (9777) | 527 | ? | 6426 (Q/S) | | + |
| | Nsp12 (9778) | 346 | ? | 6772 (Q/A) | | + |
| | Nsp13 (9779) | 298 | ? | — | | + |
| Structural | Spike (S) | | Major antigenic | | Leader peptide, 1 TMD, 17 N- | + |
| region | (6042) | | determinant, contains the | | glycosylation sites | |
| | | | receptor-binding domain | | | |
| | Orf3 (6043) | 274 | ? | | 2 TMDs, 1 N-glycosylation site, 10 | − |
| | | | | | O-glycosylation sites | |
| | Orf4 (6044) | 154 | ? | | | − |
| | Envelope (E) | 76 | Associated with viral | | 1 TMD, 2 N-glycosylation sites | + |
| | (6045) | | envelope | | | |
| | Matrix (M) | 221 | Associated with viral | | 3 TMDs, 1 N-glycosylation site | + |
| | (6046) | | envelope, membrane | | | |
| | | | spanning protein | | | |
| | Orf7 | 63 | ? | | 1 TMD | − |
| | (6047) | | | | | |
| | Orf8 (6048) | 122 | ? | | 1 TMD | − |
| | Orf9 (6049) | 44 | ? | | Surface-associated | − |
| | Orf10 | 39 | ? | | Surface-associated | − |
| | Orf11(6050) | 84 | ? | | 1 N-glycosylation site | − |
| | Nucleocapsid (N) | 422 | Associated with viral | | phosphoprotein | + |
| | (6052) | | genomic RNA | | | |
| | Orf13 | 98 | ? | | 1 O-glycosylation site | − |

TMD: predicted transmembrane domain.
Cons^{d}*: + indicates presence of corresponding protein at least in one of the other coronaviruses
^{#}Alternatively, cleaved after Gly-Gly (i.e. at G/A) to give a 180mer
^{##}This 2422mer may be further cleaved after residue 1922 (Gly-2740 of SEQ ID NO: 6039) to give a 1922mer PLpro containing the Zn-binding motif (SEQ ID NO: 7254) and a 500mer.

[1670] TABLE 11
Protein homologies between SARS and other coronaviruses

| | group 1 | | | group 2 | | group 3 |
|---|---|---|---|---|---|---|
| Proteins | 229E | TGV | PEDV | MHV | BCoV | AIBV |

REPLICASE REGION

| | | | | | | |
|---|---|---|---|---|---|---|
| leader protein | <20 | <20 | <20 | 27 | <20 | <20 |
| p28 | | | | | | |
| p65 homologue | <20 | 23 | 23 | <20 | 20 | <20 |
| nsp1 | 25.5 | 25.8 | 25.4 | 29 | 30 | 25 |
| (PLP protease) | | | | | | |
| nsp2 | 40.4 | 43.8 | 44.6 | 50 | 48.4 | 41 |
| (3CL protease) | | | | | | |
| nsp3 | 30 | 27 | 29.4 | 34.2 | 35.5 | 28.5 |
| nsp4 | 38.6 | 42.2 | 39.8 | 47.5 | 46.1 | 37.3 |
| nsp5 | 48.2 | 42.9 | 43.9 | 46.8 | 47.3 | 38.7 |
| nsp6 | 45.1 | 38.9 | 45.1 | 45.1 | 46.9 | 39.8 |
| nsp7 | 53.8 | 54.5 | 56.1 | 56.2 | 55.4 | 58.3 |
| nsp9 | 59.8 | 59.6 | 60 | 67.3 | 66.9 | 62.4 |
| (polymerase) | | | | | | |
| nsp10 | 60.7 | 62 | 62.3 | 67.2 | 68.6 | 58.9 |
| (helicase) | | | | | | |
| nsp11 | 52.3 | 53.7 | 52.3 | 57.6 | 57.6 | 52 |
| nsp12 | 43.1 | 43 | 45.4 | 45.9 | 45 | 40.2 |
| nsp13 | 56.4 | 54.4 | 55.3 | 63 | 65 | 53.4 |

STRUCTURAL REGION

| | | | | | | |
|---|---|---|---|---|---|---|
| Spike (S) | 28.8 | 31.6* | 30.3 | 31.1 | 31 | 32.7* |
| Envelope (E) | 33* | 27.9 | 20 | 23 | 26.5 | 23.2 |
| Matrix | 30.6 | 32.5 | 34.8 | 40.8 | 41.9 | 32.5 |
| glycoprotein | | | | | | |
| (M) | | | | | | |
| Nucleocapsid | 26.9 | 30.1 | 29.5 | 37.3 | 37.4 | 31.5 |
| (N) | | | | | | |

*These three alignments were obtained only on a fragment of the whole protein.
Numbers indicate percentage of aminoacid identity between SARS proteins and corresponding gene products of other coronaviruses. More conserved pairs are in bold; more variable pairs are underlined.

[1671] TABLE 12
Nucleotide and aminoacid differences between five SARS isolates

| | | FRA* | TOR2* | Urbani* | CUHK* | HKU* |
|---|---|---|---|---|---|---|
| | position° | base/aminoacid | base/aminoacid | base/aminoacid | base/aminoacid | base/aminoacid |
| ORF1a | 2557 | A/Thr | G/Ala | G/Ala | G/Ala | G/Ala |
| | 2601 | T/Val | | | | C |
| | 7746 | G/Pro | | | T | |
| | 7919 | C/Ala | | T/Val | | |
| | 7930 | G/Asp | | | | A/Asn |
| | 8387 | G/Ser | | | | C/Thr |
| | 8416 | G/Arg | | | | C/Thr |
| | 9404 | T/Val | | | C/Ala | |
| | 9479 | T/Val | | | C/Ala | |
| | 11448 | T/Ile | C | C | C | C |
| ORF1b | 13494 | GT/Val | | | | AG/Ser |
| | 16622 | C/Ala | | T | | |
| | 17564 | T/Asp | | | C/Glu | |
| | 17846 | C/Arg | | | T | |
| | 18065 | G/Lys | | | | A |
| | 18965 | A/Ile | T | T | T | T |
| | 19064 | A/Glu | | G | G | |
| | 19084 | T/Ile | C/Thr | C/Thr | C/Thr | C/Thr |
| spike | 21721 | G/Gly | | | A/Asp | |
| | 22222 | T/Ile | | | C/Thr | |
| | 23220 | T/Ser | G/Ala | | | |
| | 24872 | T/Leu | | C | | |
| | 24933 | T/Phe | C/Leu | C/Leu | C/Leu | C/Leu |
| ORF3 | 25298 | G/Gly | A/Arg | | | |
| | 25569 | T/Met | | | | A/Lys |
| matrix | 26600 | T/Val | C/Ala | C/Ala | C/Ala | |
| | 26857 | T/Ser | | C/Pro | | |
| ORF10 | 27827 | T/Cys | | | C/Arg | |
| nucleocapsid | 28268 | T/Ile | C/Thr | C/Thr | C/Thr | C/Thr |

*SARS coronavirus FRA (accession number AY310120)
SARS coronavirus TOR2 (accession number AY274119)
SARS coronavirus Urbani (accession number AY278741)
SARS coronavirus CUHK-W1 (accession number AY278554)
SARS coronavirus HKU-39849 (accession number AY278491)
°The position is based on the FRA sequence.

[1672] TABLES 13-25: T-epitope predictions for SEQ ID NOS: 6039-6050 & 6052

[1673] Epitope predictions were performed at http://www.mpiib-berlin.mpg.de/MAPPP/binding.html using a minimum score of 0.5 and the BIMAS matrix, with a maximum of 20 results being selected. The analysis revealed 9 mer and 10 mer epitopes.

TABLE 13
Epitopes for SEQ ID NO: 6039

| | | | | |
|---|---|---|---|---|
| | Start | | % of max. | |
| Rank | position | Sequence | score | Score |

HLA A1 - 9 mers

| Maximum possible score using this molecule type | | | | 5625 |
|---|---|---|---|---|
| 1 | 1867 | SEQ ID NO: 7400 | 8% | 450 |
| 2 | 4139 | SEQ ID NO: 7401 | 5.55% | 312.5 |
| 3 | 88 | SEQ ID NO: 7402 | 4% | 225 |
| 4 | 4249 | SEQ ID NO: 7403 | 3.55% | 200 |
| 5 | 4059 | SEQ ID NO: 7404 | 2.22% | 125 |
| 6 | 2027 | SEQ ID NO: 7405 | 1.6% | 90 |
| 7 | 3413 | SEQ ID NO: 7406 | 1.11% | 62.5 |
| 8 | 1823 | SEQ ID NO: 7407 | 0.88% | 50 |
| 9 | 2798 | SEQ ID NO: 7408 | 0.88% | 50 |
| 10 | 220 | SEQ ID NO: 7409 | 0.8% | 45 |
| 11 | 3738 | SEQ ID NO: 7410 | 0.8% | 45 |
| 12 | 4182 | SEQ ID NO: 7411 | 0.8% | 45 |
| 13 | 4174 | SEQ ID NO: 7412 | 0.66% | 37.5 |
| 14 | 1940 | SEQ ID NO: 7413 | 0.55% | 31.25 |
| 15 | 38 | SEQ ID NO: 7414 | 0.48% | 27 |
| 16 | 1231 | SEQ ID NO: 7415 | 0.44% | 25 |
| 17 | 1613 | SEQ ID NO: 7416 | 0.44% | 25 |
| 18 | 3645 | SEQ ID NO: 7417 | 0.44% | 25 |
| 19 | 4192 | SEQ ID NO: 7418 | 0.44% | 25 |
| 20 | 378 | SEQ ID NO: 7419 | 0.4% | 22.5 |

HLA A1 - 10 mers

| Maximum possible score using this molecule type | | | | 5625 |
|---|---|---|---|---|
| 1 | 1867 | SEQ ID NO: 7420 | 8% | 450 |
| 2 | 1495 | SEQ ID NO: 7421 | 4% | 225 |
| 3 | 3921 | SEQ ID NO: 7422 | 2.4% | 135 |
| 4 | 486 | SEQ ID NO: 7423 | 2.22% | 125 |
| 5 | 4139 | SEQ ID NO: 7424 | 2.22% | 125 |
| 6 | 62 | SEQ ID NO: 7425 | 1.6% | 90 |
| 7 | 1190 | SEQ ID NO: 7426 | 1.6% | 90 |
| 8 | 1284 | SEQ ID NO: 7427 | 1.6% | 90 |
| 9 | 3284 | SEQ ID NO: 7428 | 1.6% | 90 |
| 10 | 2921 | SEQ ID NO: 7429 | 1.2% | 67.5 |
| 11 | 349 | SEQ ID NO: 7430 | 0.8% | 45 |
| 12 | 789 | SEQ ID NO: 7431 | 0.8% | 45 |
| 13 | 1185 | SEQ ID NO: 7432 | 0.8% | 45 |
| 14 | 4184 | SEQ ID NO: 7433 | 0.8% | 45 |
| 15 | 1313 | SEQ ID NO: 7434 | 0.64% | 36 |
| 16 | 3948 | SEQ ID NO: 7435 | 0.48% | 27 |
| 17 | 149 | SEQ ID NO: 7436 | 0.44% | 25 |
| 18 | 941 | SEQ ID NO: 7437 | 0.44% | 25 |
| 19 | 1390 | SEQ ID NO: 7438 | 0.44% | 25 |
| 20 | 1613 | SEQ ID NO: 7439 | 0.44% | 25 |

HLA A3 - 9 mers

| Maximum possible score using this molecule type | | | | 12150 |
|---|---|---|---|---|
| 1 | 1010 | SEQ ID NO: 7440 | 1.48% | 180 |
| 2 | 3155 | SEQ ID NO: 7441 | 1.48% | 180 |
| 3 | 1229 | SEQ ID NO: 7442 | 1.23% | 150 |
| 4 | 2405 | SEQ ID NO: 7443 | 0.88% | 108 |
| 5 | 2 | SEQ ID NO: 7444 | 0.74% | 90 |
| 6 | 2304 | SEQ ID NO: 7445 | 0.74% | 90 |
| 7 | 2358 | SEQ ID NO: 7446 | 0.74% | 90 |
| 8 | 3160 | SEQ ID NO: 7447 | 0.74% | 90 |
| 9 | 3771 | SEQ ID NO: 7448 | 0.74% | 90 |
| 10 | 4007 | SEQ ID NO: 7449 | 0.74% | 90 |
| 11 | 3079 | SEQ ID NO: 7450 | 0.66% | 81 |
| 12 | 4045 | SEQ ID NO: 7451 | 0.66% | 81 |
| 13 | 1081 | SEQ ID NO: 7452 | 0.49% | 60 |
| 14 | 3268 | SEQ ID NO: 7453 | 0.49% | 60 |
| 15 | 4144 | SEQ ID NO: 7454 | 0.49% | 60 |
| 16 | 614 | SEQ ID NO: 7455 | 0.37% | 45 |
| 17 | 728 | SEQ ID NO: 7456 | 0.37% | 45 |
| 18 | 1537 | SEQ ID NO: 7457 | 0.37% | 45 |
| 19 | 313 | SEQ ID NO: 7458 | 0.32% | 40 |
| 20 | 1744 | SEQ ID NO: 7459 | 0.32% | 40 |

HLA A3 - 10 mers

| Maximum possible score using this molecule type | | | | 12150 |
|---|---|---|---|---|
| 1 | 62 | SEQ ID NO: 7460 | 4.44% | 540 |
| 2 | 2151 | SEQ ID NO: 7461 | 2.46% | 300 |
| 3 | 633 | SEQ ID NO: 7462 | 2.22% | 270 |
| 4 | 1158 | SEQ ID NO: 7463 | 2.22% | 270 |
| 5 | 2565 | SEQ ID NO: 7464 | 2.22% | 270 |
| 6 | 2298 | SEQ ID NO: 7465 | 1.77% | 216 |
| 7 | 3159 | SEQ ID NO: 7466 | 1.11% | 135 |
| 8 | 640 | SEQ ID NO: 7467 | 0.98% | 120 |
| 9 | 2186 | SEQ ID NO: 7468 | 0.74% | 90 |
| 10 | 3869 | SEQ ID NO: 7469 | 0.74% | 90 |
| 11 | 2308 | SEQ ID NO: 7470 | 0.66% | 81 |
| 12 | 786 | SEQ ID NO: 7471 | 0.55% | 67.5 |
| 13 | 749 | SEQ ID NO: 7472 | 0.49% | 60 |
| 14 | 1080 | SEQ ID NO: 7473 | 0.49% | 60 |
| 15 | 2358 | SEQ ID NO: 7474 | 0.49% | 60 |
| 16 | 3955 | SEQ ID NO: 7475 | 0.49% | 60 |
| 17 | 714 | SEQ ID NO: 7476 | 0.37% | 45 |
| 18 | 1081 | SEQ ID NO: 7477 | 0.37% | 45 |
| 19 | 1170 | SEQ ID NO: 7478 | 0.37% | 45 |
| 20 | 1228 | SEQ ID NO: 7479 | 0.37% | 45 |

HLA A24 - 9 mers

| Maximum possible score using this molecule type | | | | 1596.672 |
|---|---|---|---|---|
| 1 | 3797 | SEQ ID NO: 7480 | 37.57% | 600 |
| 2 | 4202 | SEQ ID NO: 7481 | 37.57% | 600 |
| 3 | 3189 | SEQ ID NO: 7482 | 25.05% | 400 |
| 4 | 1864 | SEQ ID NO: 7483 | 23.14% | 369.6 |
| 5 | 1066 | SEQ ID NO: 7484 | 22.54% | 360 |
| 6 | 2143 | SEQ ID NO: 7485 | 22.54% | 360 |
| 7 | 2693 | SEQ ID NO: 7486 | 22.54% | 360 |
| 8 | 1426 | SEQ ID NO: 7487 | 18.78% | 300 |
| 9 | 1238 | SEQ ID NO: 7488 | 18.03% | 288 |
| 10 | 3768 | SEQ ID NO: 7489 | 18.03% | 288 |
| 11 | 797 | SEQ ID NO: 7490 | 15.03% | 240 |
| 12 | 1882 | SEQ ID NO: 7491 | 15.03% | 240 |
| 13 | 1490 | SEQ ID NO: 7492 | 13.77% | 220 |
| 14 | 2237 | SEQ ID NO: 7493 | 13.77% | 220 |
| 15 | 95 | SEQ ID NO: 7494 | 12.52% | 200 |
| 16 | 1821 | SEQ ID NO: 7495 | 12.52% | 200 |
| 17 | 2289 | SEQ ID NO: 7496 | 12.52% | 200 |
| 18 | 3080 | SEQ ID NO: 7497 | 12.52% | 200 |
| 19 | 3660 | SEQ ID NO: 7498 | 12.52% | 200 |
| 20 | 4354 | SEQ ID NO: 7499 | 12.52% | 200 |

HLA A24 - 10 mers

| Maximum possible score using this molecule type | | | | 1596.672 |
|---|---|---|---|---|
| 1 | 2143 | SEQ ID NO: 7500 | 37.87% | 604.8 |
| 2 | 1159 | SEQ ID NO: 7501 | 26.30% | 420 |
| 3 | 1650 | SEQ ID NO: 7502 | 26.30% | 420 |
| 4 | 1150 | SEQ ID NO: 7503 | 18.78% | 300 |
| 5 | 2763 | SEQ ID NO: 7504 | 18.78% | 300 |
| 6 | 3165 | SEQ ID NO: 7505 | 18.78% | 300 |
| 7 | 3201 | SEQ ID NO: 7506 | 15.03% | 240 |
| 8 | 3694 | SEQ ID NO: 7507 | 15.03% | 240 |
| 9 | 4204 | SEQ ID NO: 7508 | 15.03% | 240 |
| 10 | 1692 | SEQ ID NO: 7509 | 13.77% | 220 |
| 11 | 797 | SEQ ID NO: 7510 | 12.52% | 200 |
| 12 | 1610 | SEQ ID NO: 7511 | 12.52% | 200 |
| 13 | 1789 | SEQ ID NO: 7512 | 12.52% | 200 |
| 14 | 1881 | SEQ ID NO: 7513 | 12.52% | 200 |
| 15 | 3090 | SEQ ID NO: 7514 | 12.52% | 200 |
| 16 | 3763 | SEQ ID NO: 7515 | 12.52% | 200 |
| 17 | 2569 | SEQ ID NO: 7516 | 11.27% | 180 |
| 18 | 194 | SEQ ID NO: 7517 | 9.39% | 150 |
| 19 | 1771 | SEQ ID NO: 7518 | 9.39% | 150 |
| 20 | 2488 | SEQ ID NO: 7519 | 9.39% | 150 |

HLA A 0201 - 9 mers

| Maximum possible score using this molecule type | | | | 3925227.1 |
|---|---|---|---|---|
| 1 | 2308 | SEQ ID NO: 7520 | 0.20% | 8144.13515256 |
| 2 | 3729 | SEQ ID NO: 7521 | 0.10% | 4047.23088 |
| 3 | 3574 | SEQ ID NO: 7522 | 0.09% | 3547.4996634 |
| 4 | 3615 | SEQ ID NO: 7523 | 0.06% | 2722.682592 |
| 5 | 3159 | SEQ ID NO: 7524 | 0.05% | 1999.734264 |
| 6 | 2339 | SEQ ID NO: 7525 | 0.03% | 1551.92907744 |
| 7 | 2201 | SEQ ID NO: 7526 | 0.03% | 1521.53694 |
| 8 | 3559 | SEQ ID NO: 7527 | 0.02% | 1174.38939504 |
| 9 | 3085 | SEQ ID NO: 7528 | 0.02% | 1146.296448 |
| 10 | 4070 | SEQ ID NO: 7529 | 0.02% | 970.4103696 |
| 11 | 3708 | SEQ ID NO: 7530 | 0.02% | 958.92888 |
| 12 | 3098 | SEQ ID NO: 7531 | 0.02% | 942.678 |
| 13 | 1362 | SEQ ID NO: 7532 | 0.02% | 900.6984 |
| 14 | 3563 | SEQ ID NO: 7533 | 0.01% | 735.86016 |
| 15 | 3774 | SEQ ID NO: 7534 | 0.01% | 687.655656 |
| 16 | 4242 | SEQ ID NO: 7535 | 0.01% | 685.78272 |
| 17 | 2340 | SEQ ID NO: 7536 | 0.01% | 668.37342936 |
| 18 | 650 | SEQ ID NO: 7537 | 0.01% | 640.1983392 |
| 19 | 3862 | SEQ ID NO: 7538 | 0.01% | 620.57772 |
| 20 | 2860 | SEQ ID NO: 7539 | 0.01% | 607.88448 |

HLA A 0201 - 10 mers

| Maximum possible score using this molecule type | | | | 3925227.1 |
|---|---|---|---|---|
| 1 | 2307 | SEQ ID NO: 7540 | 0.40% | 15915.66281448 |
| 2 | 2201 | SEQ ID NO: 7541 | 0.12% | 4772.09313 |
| 3 | 3558 | SEQ ID NO: 7542 | 0.05% | 2295.04855632 |
| 4 | 1772 | SEQ ID NO: 7543 | 0.04% | 1759.6656 |
| 5 | 3087 | SEQ ID NO: 7544 | 0.03% | 1215.76896 |
| 6 | 2339 | SEQ ID NO: 7545 | 0.02% | 1116.29986272 |
| 7 | 2308 | SEQ ID NO: 7546 | 0.02% | 970.14776112 |
| 8 | 3061 | SEQ ID NO: 7547 | 0.02% | 836.2525104 |
| 9 | 2748 | SEQ ID NO: 7548 | 0.01% | 726.706344 |
| 10 | 3837 | SEQ ID NO: 7549 | 0.01% | 720.8292 |
| 11 | 59 | SEQ ID NO: 7550 | 0.01% | 650.3112 |
| 12 | 2877 | SEQ ID NO: 7551 | 0.01% | 620.22996 |
| 13 | 4114 | SEQ ID NO: 7552 | 0.01% | 559.8936 |
| 14 | 805 | SEQ ID NO: 7553 | 0.01% | 484.4565072 |
| 15 | 1655 | SEQ ID NO: 7554 | 0.01% | 437.48208 |
| 16 | 611 | SEQ ID NO: 7555 | 0.00% | 319.9392 |
| 17 | 1961 | SEQ ID NO: 7556 | 0.00% | 305.94186 |
| 18 | 1223 | SEQ ID NO: 7557 | 0.00% | 289.08792 |
| 19 | 852 | SEQ ID NO: 7558 | 0.00% | 285.67242 |
| 20 | 2139 | SEQ ID NO: 7559 | 0.00% | 284.845869 |

HLA A 1101 - 9 mers

| Maximum possible score using this molecule type | | | | 36 |
|---|---|---|---|---|
| 1 | 4200 | SEQ ID NO: 7560 | 50% | 18 |
| 2 | 281 | SEQ ID NO: 7561 | 25% | 9 |
| 3 | 3236 | SEQ ID NO: 7562 | 25% | 9 |
| 4 | 509 | SEQ ID NO: 7563 | 16.66% | 6 |
| 5 | 848 | SEQ ID NO: 7564 | 16.66% | 6 |
| 6 | 2193 | SEQ ID NO: 7565 | 16.66% | 6 |
| 7 | 3542 | SEQ ID NO: 7566 | 16.66% | 6 |
| 8 | 541 | SEQ ID NO: 7567 | 15% | 5.4 |
| 9 | 1748 | SEQ ID NO: 7568 | 12.5% | 4.5 |
| 10 | 829 | SEQ ID NO: 7569 | 11.11% | 4 |
| 11 | 1149 | SEQ ID NO: 7570 | 11.11% | 4 |
| 12 | 2027 | SEQ ID NO: 7571 | 11.11% | 4 |
| 13 | 2576 | SEQ ID NO: 7572 | 11.11% | 4 |
| 14 | 873 | SEQ ID NO: 7573 | 8.33% | 3 |
| 15 | 2725 | SEQ ID NO: 7574 | 8.33% | 3 |
| 16 | 3541 | SEQ ID NO: 7575 | 8.33% | 3 |
| 17 | 1837 | SEQ ID NO: 7576 | 7.5% | 2.7 |
| 18 | 2475 | SEQ ID NO: 7577 | 7.5% | 2.7 |
| 19 | 2703 | SEQ ID NO: 7578 | 7.5% | 2.7 |
| 20 | 1823 | SEQ ID NO: 7579 | 6.66% | 2.4 |

HLA A 1101 - 10 mers

| Maximum possible score using this molecule type | | | | 36 |
|---|---|---|---|---|
| 1 | 3541 | SEQ ID NO: 7580 | 50% | 18 |
| 2 | 281 | SEQ ID NO: 7581 | 25% | 9 |
| 3 | 1495 | SEQ ID NO: 7582 | 25% | 9 |
| 4 | 2303 | SEQ ID NO: 7583 | 25% | 9 |
| 5 | 2616 | SEQ ID NO: 7584 | 25% | 9 |
| 6 | 48 | SEQ ID NO: 7585 | 16.66% | 6 |
| 7 | 1394 | SEQ ID NO: 7586 | 16.66% | 6 |
| 8 | 1499 | SEQ ID NO: 7587 | 16.66% | 6 |
| 9 | 1862 | SEQ ID NO: 7588 | 16.66% | 6 |
| 10 | 1163 | SEQ ID NO: 7589 | 11.11% | 4 |
| 11 | 4006 | SEQ ID NO: 7590 | 11.11% | 4 |
| 12 | 4344 | SEQ ID NO: 7591 | 11.11% | 4 |
| 13 | 633 | SEQ ID NO: 7592 | 10% | 3.6 |
| 14 | 119 | SEQ ID NO: 7593 | 8.33% | 3 |
| 15 | 1190 | SEQ ID NO: 7594 | 8.33% | 3 |
| 16 | 1195 | SEQ ID NO: 7595 | 8.33% | 3 |
| 17 | 1725 | SEQ ID NO: 7596 | 8.33% | 3 |
| 18 | 2728 | SEQ ID NO: 7597 | 8.33% | 3 |
| 19 | 2895 | SEQ ID NO: 7598 | 8.33% | 3 |
| 20 | 3033 | SEQ ID NO: 7599 | 8.33% | 3 |

HLA B7 - 9 mers

| Maximum possible score using this molecule type | | | | 5400 |
|---|---|---|---|---|
| 1 | 1335 | SEQ ID NO: 7600 | 4.44% | 240 |
| 2 | 2580 | SEQ ID NO: 7601 | 4.44% | 240 |
| 3 | 1703 | SEQ ID NO: 7602 | 3.70% | 200 |
| 4 | 113 | SEQ ID NO: 7603 | 2.22% | 120 |
| 5 | 168 | SEQ ID NO: 7604 | 2.22% | 120 |
| 6 | 2842 | SEQ ID NO: 7605 | 2.22% | 120 |
| 7 | 4027 | SEQ ID NO: 7606 | 2.22% | 120 |
| 8 | 3680 | SEQ ID NO: 7607 | 1.66% | 90 |
| 9 | 2085 | SEQ ID NO: 7608 | 1.48% | 80 |
| 10 | 2492 | SEQ ID NO: 7609 | 1.48% | 80 |
| 11 | 2660 | SEQ ID NO: 7610 | 1.48% | 80 |
| 12 | 2906 | SEQ ID NO: 7611 | 1.48% | 80 |
| 13 | 3346 | SEQ ID NO: 7612 | 1.48% | 80 |
| 14 | 4038 | SEQ ID NO: 7613 | 1.48% | 80 |
| 15 | 1163 | SEQ ID NO: 7614 | 1.11% | 60 |
| 16 | 1457 | SEQ ID NO: 7615 | 1.11% | 60 |
| 17 | 2351 | SEQ ID NO: 7616 | 1.11% | 60 |
| 18 | 2471 | SEQ ID NO: 7617 | 1.11% | 60 |
| 19 | 3499 | SEQ ID NO: 7618 | 1.11% | 60 |
| 20 | 3635 | SEQ ID NO: 7619 | 1.11% | 60 |

HLA B7 - 10 mers

| Maximum possible score using this molecule type | | | | 5400 |
|---|---|---|---|---|
| 1 | 1703 | SEQ ID NO: 7620 | 3.70% | 200 |
| 2 | 17 | SEQ ID NO: 7621 | 2.22% | 120 |
| 3 | 3008 | SEQ ID NO: 7622 | 2.22% | 120 |
| 4 | 4106 | SEQ ID NO: 7623 | 2.22% | 120 |
| 5 | 3450 | SEQ ID NO: 7624 | 1.66% | 90 |
| 6 | 113 | SEQ ID NO: 7625 | 1.48% | 80 |
| 7 | 195 | SEQ ID NO: 7626 | 1.48% | 80 |
| 8 | 307 | SEQ ID NO: 7627 | 1.48% | 80 |
| 9 | 780 | SEQ ID NO: 7628 | 1.48% | 80 |
| 10 | 1000 | SEQ ID NO: 7629 | 1.48% | 80 |
| 11 | 1072 | SEQ ID NO: 7630 | 1.48% | 80 |
| 12 | 1404 | SEQ ID NO: 7631 | 1.48% | 80 |
| 13 | 1980 | SEQ ID NO: 7632 | 1.48% | 80 |
| 14 | 2262 | SEQ ID NO: 7633 | 1.48% | 80 |
| 15 | 2543 | SEQ ID NO: 7634 | 1.48% | 80 |
| 16 | 2906 | SEQ ID NO: 7635 | 1.48% | 80 |
| 17 | 3077 | SEQ ID NO: 7636 | 1.48% | 80 |
| 18 | 3175 | SEQ ID NO: 7637 | 1.48% | 80 |
| 19 | 4195 | SEQ ID NO: 7638 | 1.48% | 80 |
| 20 | 4251 | SEQ ID NO: 7639 | 1.48% | 80 |

[1674] TABLE 14
Epitopes for SEQ ID NO: 6040

| | | | | |
|---|---|---|---|---|
| | Start | | % of max. | |
| Rank | position | Sequence | score | Score |

HLA A1 - 9 mers

| Maximum possible score using this molecule type | | | | 5625 |
|---|---|---|---|---|
| 1 | 20 | SEQ ID NO: 7640 | 0.04% | 2.25 |
| 2 | 91 | SEQ ID NO: 7641 | 0.01% | 1 |
| 3 | 125 | SEQ ID NO: 7642 | 0.01% | 0.75 |
| 4 | 56 | SEQ ID NO: 7643 | 0.00% | 0.5 |
| 5 | 145 | SEQ ID NO: 7644 | 0.00% | 0.5 |

HLA A1 - 10 mers

| Maximum possible score using this molecule type | | | | 5625 |
|---|---|---|---|---|
| 1 | 20 | SEQ ID NO: 7645 | 0.01% | 0.9 |
| 2 | 56 | SEQ ID NO: 7646 | 0.00% | 0.5 |
| 3 | 71 | SEQ ID NO: 7647 | 0.00% | 0.5 |
| 4 | 144 | SEQ ID NO: 7648 | 0.00% | 0.5 |

HLA A3 - 9 mers

| Maximum possible score using this molecule type | | | | 12150 |
|---|---|---|---|---|
| 1 | 115 | SEQ ID NO: 7649 | 0.24% | 30 |
| 2 | 87 | SEQ ID NO: 7650 | 0.04% | 6 |
| 3 | 80 | SEQ ID NO: 7651 | 0.03% | 4.05 |
| 4 | 125 | SEQ ID NO: 7652 | 0.01% | 1.8 |
| 5 | 39 | SEQ ID NO: 7653 | 0.01% | 1.5 |
| 6 | 56 | SEQ ID NO: 7654 | 0.01% | 1.5 |
| 7 | 135 | SEQ ID NO: 7655 | 0.00% | 1.2 |
| 8 | 91 | SEQ ID NO: 7656 | 0.00% | 1 |
| 9 | 119 | SEQ ID NO: 7657 | 0.00% | 1 |
| 10 | 141 | SEQ ID NO: 7658 | 0.00% | 0.9 |
| 11 | 150 | SEQ ID NO: 7659 | 0.00% | 0.6 |
| 12 | 137 | SEQ ID NO: 7660 | 0.00% | 0.54 |

HLA A3 - 10 mers

| Maximum possible score using this molecule type | | | | 12150 |
|---|---|---|---|---|
| 1 | 36 | SEQ ID NO: 7661 | 0.24% | 30 |
| 2 | 144 | SEQ ID NO: 7662 | 0.06% | 8 |
| 3 | 101 | SEQ ID NO: 7663 | 0.03% | 4 |
| 4 | 99 | SEQ ID NO: 7664 | 0.02% | 3.6 |
| 5 | 80 | SEQ ID NO: 7665 | 0.02% | 2.7 |
| 6 | 125 | SEQ ID NO: 7666 | 0.01% | 1.6875 |
| 7 | 71 | SEQ ID NO: 7667 | 0.01% | 1.5 |
| 8 | 118 | SEQ ID NO: 7668 | 0.01% | 1.5 |
| 9 | 40 | SEQ ID NO: 7669 | 0.01% | 1.35 |
| 10 | 5 | SEQ ID NO: 7670 | 0.00% | 0.9 |
| 11 | 56 | SEQ ID NO: 7671 | 0.00% | 0.9 |
| 12 | 107 | SEQ ID NO: 7672 | 0.00% | 0.6 |
| 13 | 135 | SEQ ID NO: 7673 | 0.00% | 0.6 |
| 14 | 141 | SEQ ID NO: 7674 | 0.00% | 0.6 |
| 15 | 148 | SEQ ID NO: 7675 | 0.00% | 0.6 |
| 16 | 116 | SEQ ID NO: 7676 | 0.00% | 0.5 |

HLA A24 - 9 mers

| Maximum possible score using this molecule type | | | | 1596.672 |
|---|---|---|---|---|
| 1 | 153 | SEQ ID NO: 7677 | 1.05% | 16.8 |
| 2 | 80 | SEQ ID NO: 7678 | 0.75% | 12 |
| 3 | 123 | SEQ ID NO: 7679 | 0.50% | 8 |
| 4 | 137 | SEQ ID NO: 7680 | 0.50% | 8 |
| 5 | 9 | SEQ ID NO: 7681 | 0.45% | 7.2 |
| 6 | 77 | SEQ ID NO: 7682 | 0.45% | 7.2 |
| 7 | 112 | SEQ ID NO: 7683 | 0.45% | 7.2 |
| 8 | 73 | SEQ ID NO: 7684 | 0.41% | 6.6 |
| 9 | 32 | SEQ ID NO: 7685 | 0.37% | 6 |
| 10 | 110 | SEQ ID NO: 7686 | 0.37% | 6 |
| 11 | 140 | SEQ ID NO: 7687 | 0.37% | 6 |
| 12 | 143 | SEQ ID NO: 7688 | 0.37% | 6 |
| 13 | 18 | SEQ ID NO: 7689 | 0.30% | 4.8 |
| 14 | 54 | SEQ ID NO: 7690 | 0.30% | 4.8 |
| 15 | 108 | SEQ ID NO: 7691 | 0.30% | 4.8 |
| 16 | 141 | SEQ ID NO: 7692 | 0.30% | 4.8 |
| 17 | 92 | SEQ ID NO: 7693 | 0.27% | 4.4 |
| 18 | 33 | SEQ ID NO: 7694 | 0.25% | 4 |
| 19 | 49 | SEQ ID NO: 7695 | 0.25% | 4 |
| 20 | 111 | SEQ ID NO: 7696 | 0.25% | 4 |

HLA A24 - 10 mers

| Maximum possible score using this molecule type | | | | 1596.672 |
|---|---|---|---|---|
| 1 | 142 | SEQ ID NO: 7697 | 12.52% | 200 |
| 2 | 110 | SEQ ID NO: 7698 | 0.75% | 12 |
| 3 | 99 | SEQ ID NO: 7699 | 0.50% | 8 |
| 4 | 8 | SEQ ID NO: 7700 | 0.45% | 7.2 |
| 5 | 140 | SEQ ID NO: 7701 | 0.45% | 7.2 |
| 6 | 32 | SEQ ID NO: 7702 | 0.37% | 6 |
| 7 | 17 | SEQ ID NO: 7703 | 0.30% | 4.8 |
| 8 | 53 | SEQ ID NO: 7704 | 0.30% | 4.8 |
| 9 | 76 | SEQ ID NO: 7705 | 0.30% | 4.8 |
| 10 | 107 | SEQ ID NO: 7706 | 0.30% | 4.8 |
| 11 | 111 | SEQ ID NO: 7707 | 0.30% | 4.8 |
| 12 | 72 | SEQ ID NO: 7708 | 0.27% | 4.4 |
| 13 | 91 | SEQ ID NO: 7709 | 0.27% | 4.4 |
| 14 | 31 | SEQ ID NO: 7710 | 0.25% | 4 |
| 15 | 127 | SEQ ID NO: 7711 | 0.25% | 4 |
| 16 | 139 | SEQ ID NO: 7712 | 0.25% | 4 |
| 17 | 80 | SEQ ID NO: 7713 | 0.22% | 3.6 |
| 18 | 38 | SEQ ID NO: 7714 | 0.18% | 3 |
| 19 | 118 | SEQ ID NO: 7715 | 0.18% | 3 |
| 20 | 49 | SEQ ID NO: 7716 | 0.12% | 2 |

HLA A 0201 - 9 mers

| Maximum possible score using this molecule type | | | | 3925227.1 |
|---|---|---|---|---|
| 1 | 80 | SEQ ID NO: 7717 | 0.00% | 171.96732 |
| 2 | 147 | SEQ ID NO: 7718 | 0.00% | 51.46848 |
| 3 | 143 | SEQ ID NO: 7719 | 0.00% | 11.6146182 |
| 4 | 56 | SEQ ID NO: 7720 | 0.00% | 11.304684 |
| 5 | 10 | SEQ ID NO: 7721 | 0.00% | 10.34586 |
| 6 | 6 | SEQ ID NO: 7722 | 0.00% | 6.56830734 |
| 7 | 26 | SEQ ID NO: 7723 | 0.00% | 6.07614 |
| 8 | 141 | SEQ ID NO: 7724 | 0.00% | 5.981472 |
| 9 | 148 | SEQ ID NO: 7725 | 0.00% | 5.194044 |
| 10 | 9 | SEQ ID NO: 7726 | 0.00% | 4.299183 |
| 11 | 137 | SEQ ID NO: 7727 | 0.00% | 4.299183 |
| 12 | 130 | SEQ ID NO: 7728 | 0.00% | 4.138344 |
| 13 | 84 | SEQ ID NO: 7729 | 0.00% | 3.42792 |
| 14 | 27 | SEQ ID NO: 7730 | 0.00% | 3.383484 |
| 15 | 2 | SEQ ID NO: 7731 | 0.00% | 3.381 |
| 16 | 62 | SEQ ID NO: 7732 | 0.00% | 3.251556 |
| 17 | 23 | SEQ ID NO: 7733 | 0.00% | 2.9542005 |
| 18 | 99 | SEQ ID NO: 7734 | 0.00% | 1.982232 |
| 19 | 33 | SEQ ID NO: 7735 | 0.00% | 1.86921 |
| 20 | 111 | SEQ ID NO: 7736 | 0.00% | 1.76402985 |

HLA A 0201 - 10 mers

| Maximum possible score using this molecule type | | | | 3925227.1 |
|---|---|---|---|---|
| 1 | 5 | SEQ ID NO: 7737 | 0.00% | 159.9696 |
| 2 | 25 | SEQ ID NO: 7738 | 0.00% | 69.552 |
| 3 | 80 | SEQ ID NO: 7739 | 0.00% | 36.5148 |
| 4 | 107 | SEQ ID NO: 7740 | 0.00% | 21.3624 |
| 5 | 148 | SEQ ID NO: 7741 | 0.00% | 17.73576 |
| 6 | 61 | SEQ ID NO: 7742 | 0.00% | 13.9104 |
| 7 | 147 | SEQ ID NO: 7743 | 0.00% | 11.304684 |
| 8 | 53 | SEQ ID NO: 7744 | 0.00% | 8.230458 |
| 9 | 17 | SEQ ID NO: 7745 | 0.00% | 7.3086111 |
| 10 | 110 | SEQ ID NO: 7746 | 0.00% | 6.174104475 |
| 11 | 9 | SEQ ID NO: 7747 | 000% | 6.0858 |
| 12 | 99 | SEQ ID NO: 7748 | 0.00% | 5.6823984 |
| 13 | 2 | SEQ ID NO: 7749 | 0.00% | 3.188283 |
| 14 | 41 | SEQ ID NO: 7750 | 0.00% | 12.206413 |
| 15 | 135 | SEQ ID NO: 7751 | 0.00% | 12.076624 |
| 16 | 76 | SEQ ID NO: 7752 | 0.00% | 2.005692 |
| 17 | 23 | SEQ ID NO: 7753 | 0.00% | 1.798209 |
| 18 | 40 | SEQ ID NO: 7754 | 0.00% | 1.68996456 |
| 19 | 39 | SEQ ID NO: 7755 | 0.00% | 1.516482 |
| 20 | 118 | SEQ ID NO: 7756 | 0.00% | 1.2683304 |

HLA A 1101 - 9 mers

| Maximum possible score using this molecule type | | | | 36 |
|---|---|---|---|---|
| 1 | 91 | SEQ ID NO: 7757 | 2.77% | 1 |

HLA A 1101 - 10 mers

| Maximum possible score using this molecule type | | | | 36 |
|---|---|---|---|---|
| 1 | 101 | SEQ ID NO: 7758 | 33.33% | 12 |
| 2 | 71 | SEQ ID NO: 7759 | 2.77% | 1 |
| 3 | 90 | SEQ ID NO: 7760 | 1.66% | 0.6 |

HLA B7 - 9 mers

| Maximum possible score using this molecule type | | | | 5400 |
|---|---|---|---|---|
| 1 | 49 | SEQ ID NO: 7761 | 2.22% | 120 |
| 2 | 9 | SEQ ID NO: 7762 | 1.11% | 60 |
| 3 | 73 | SEQ ID NO: 7763 | 0.66% | 36 |
| 4 | 33 | SEQ ID NO: 7764 | 0.37% | 20 |
| 5 | 137 | SEQ ID NO: 7765 | 0.37% | 20 |
| 6 | 141 | SEQ ID NO: 7766 | 0.37% | 20 |
| 7 | 77 | SEQ ID NO: 7767 | 0.22% | 12 |
| 8 | 112 | SEQ ID NO: 7768 | 0.22% | 12 |
| 9 | 143 | SEQ ID NO: 7769 | 0.22% | 12 |
| 10 | 81 | SEQ ID NO: 7770 | 0.14% | 8 |
| 11 | 13 | SEQ ID NO: 7771 | 0.09% | 5 |
| 12 | 69 | SEQ ID NO: 7772 | 0.09% | 5 |
| 13 | 18 | SEQ ID NO: 7773 | 0.07% | 4 |
| 14 | 32 | SEQ ID NO: 7774 | 0.07% | 4 |
| 15 | 54 | SEQ ID NO: 7775 | 0.07% | 4 |
| 16 | 80 | SEQ ID NO: 7776 | 0.07% | 4 |
| 17 | 92 | SEQ ID NO: 7777 | 0.07% | 4 |
| 18 | 108 | SEQ ID NO: 7778 | 0.07% | 4 |
| 19 | 111 | SEQ ID NO: 7779 | 0.07% | 4 |
| 20 | 123 | SEQ ID NO: 7780 | 0.07% | 4 |

HLA B7 - 10 mers

| Maximum possible score using this molecule type | | | | 5400 |
|---|---|---|---|---|
| 1 | 99 | SEQ ID NO: 7781 | 0.74% | 40 |
| 2 | 17 | SEQ ID NO: 7782 | 0.37% | 20 |
| 3 | 8 | SEQ ID NO: 7783 | 0.22% | 12 |
| 4 | 72 | SEQ ID NO: 7784 | 0.22% | 12 |
| 5 | 91 | SEQ ID NO: 7785 | 0.22% | 12 |
| 6 | 127 | SEQ ID NO: 7786 | 0.11% | 6 |
| 7 | 31 | SEQ ID NO: 7787 | 0.07% | 4 |
| 8 | 32 | SEQ ID NO: 7788 | 0.07% | 4 |
| 9 | 53 | SEQ ID NO: 7789 | 0.07% | 4 |
| 10 | 76 | SEQ ID NO: 7790 | 0.07% | 4 |
| 11 | 107 | SEQ ID NO: 7791 | 0.07% | 4 |
| 12 | 110 | SEQ ID NO: 7792 | 0.07% | 4 |
| 13 | 111 | SEQ ID NO: 7793 | 0.07% | 4 |
| 14 | 140 | SEQ ID NO: 7794 | 0.07% | 4 |
| 15 | 9 | SEQ ID NO: 7795 | 0.05% | 3 |
| 16 | 19 | SEQ ID NO: 7796 | 0.05% | 3 |
| 17 | 33 | SEQ ID NO: 7797 | 0.03% | 2 |
| 18 | 93 | SEQ ID NO: 7798 | 0.03% | 2 |
| 19 | 102 | SEQ ID NO: 7799 | 0.03% | 2 |
| 20 | 129 | SEQ ID NO: 7800 | 0.02% | 1.5 |

[1675] TABLE 15
Epitopes for SEQ ID NO: 6041

| | | | | |
|---|---|---|---|---|
| | | | % of | |
| | Start | | max. | |
| Rank | position | Sequence | score | Score |

HLA B7 - 10 mers

| Maximum possible score using | | | | 5625 |
|---|---|---|---|---|
| this molecule type | | | | |
| 1 | 1818 | SEQ ID NO: 7801 | 1.6% | 90 |
| 2 | 373 | SEQ ID NO: 7802 | 1.33% | 75 |
| 3 | 681 | SEQ ID NO: 7803 | 1.33% | 75 |
| 4 | 74 | SEQ ID NO: 7804 | 0.88% | 50 |
| 5 | 786 | SEQ ID NO: 7805 | 0.88% | 50 |
| 6 | 1495 | SEQ ID NO: 7806 | 0.88% | 50 |
| 7 | 88 | SEQ ID NO: 7807 | 0.8% | 45 |
| 8 | 357 | SEQ ID NO: 7808 | 0.8% | 45 |
| 9 | 1271 | SEQ ID NO: 7809 | 0.8% | 45 |
| 10 | 1799 | SEQ ID NO: 7810 | 0.8% | 45 |
| 11 | 1393 | SEQ ID NO: 7811 | 0.48% | 27 |
| 12 | 386 | SEQ ID NO: 7812 | 0.44% | 25 |
| 13 | 2304 | SEQ ID NO: 7813 | 0.44% | 25 |
| 14 | 198 | SEQ ID NO: 7814 | 0.4% | 22.5 |
| 15 | 840 | SEQ ID NO: 7815 | 0.4% | 22.5 |
| 16 | 2359 | SEQ ID NO: 7816 | 0.4% | 22.5 |
| 17 | 1194 | SEQ ID NO: 7817 | 0.32% | 18 |
| 18 | 1546 | SEQ ID NO: 7818 | 0.32% | 18 |
| 19 | 2200 | SEQ ID NO: 7819 | 0.22% | 12.5 |
| 20 | 996 | SEQ ID NO: 7820 | 0.2% | 11.25 |

HLA A1 - 9 mers

| Maximum possible score using | | | | 5625 |
|---|---|---|---|---|
| this molecule type | | | | |
| 1 | 995 | SEQ ID NO: 7821 | 10% | 562.5 |
| 2 | 1303 | SEQ ID NO: 7822 | 2.22% | 125 |
| 3 | 1582 | SEQ ID NO: 7823 | 2% | 112.5 |
| 4 | 1456 | SEQ ID NO: 7824 | 1.6% | 90 |
| 5 | 772 | SEQ ID NO: 7825 | 1.11% | 62.5 |
| 6 | 181 | SEQ ID NO: 7826 | 0.88% | 50 |
| 7 | 632 | SEQ ID NO: 7827 | 0.88% | 50 |
| 8 | 2281 | SEQ ID NO: 7828 | 0.88% | 50 |
| 9 | 1586 | SEQ ID NO: 7829 | 0.8% | 45 |
| 10 | 2109 | SEQ ID NO: 7830 | 0.8% | 45 |
| 11 | 745 | SEQ ID NO: 7831 | 0.55% | 31.25 |
| 12 | 1916 | SEQ ID NO: 7832 | 0.53% | 30 |
| 13 | 966 | SEQ ID NO: 7833 | 0.44% | 25 |
| 14 | 1387 | SEQ ID NO: 7834 | 0.44% | 25 |
| 15 | 2263 | SEQ ID NO: 7835 | 0.44% | 25 |
| 16 | 2457 | SEQ ID NO: 7836 | 0.26% | 15 |
| 17 | 1057 | SEQ ID NO: 7837 | 0.22% | 12.5 |
| 18 | 2562 | SEQ ID NO: 7838 | 0.22% | 12.5 |
| 19 | 74 | SEQ ID NO: 7839 | 0.17% | 10 |
| 20 | 298 | SEQ ID NO: 7840 | 0.17% | 10 |

HLA A1 - 10 mers

| Maximum possible score using | | | | 12150 |
|---|---|---|---|---|
| this molecule type | | | | |
| 1 | 536 | SEQ ID NO: 7841 | 3.33% | 405 |
| 2 | 986 | SEQ ID NO: 7842 | 2.46% | 300 |
| 3 | 805 | SEQ ID NO: 7843 | 1.64% | 200 |
| 4 | 2345 | SEQ ID NO: 7844 | 1.48% | 180 |
| 5 | 2481 | SEQ ID NO: 7845 | 0.55% | 67.5 |
| 6 | 204 | SEQ ID NO: 7846 | 0.49% | 60 |
| 7 | 895 | SEQ ID NO: 7847 | 0.44% | 54 |
| 8 | 1512 | SEQ ID NO: 7848 | 0.44% | 54 |
| 9 | 2491 | SEQ ID NO: 7849 | 0.37% | 45 |
| 10 | 436 | SEQ ID NO: 7850 | 0.32% | 40 |
| 11 | 917 | SEQ ID NO: 7851 | 0.32% | 40 |
| 12 | 1176 | SEQ ID NO: 7852 | 0.32% | 40 |
| 13 | 1517 | SEQ ID NO: 7853 | 0.29% | 36 |
| 14 | 466 | SEQ ID NO: 7854 | 0.24% | 30 |
| 15 | 1784 | SEQ ID NO: 7855 | 0.24% | 30 |
| 16 | 2039 | SEQ ID NO: 7856 | 0.24% | 30 |
| 17 | 2124 | SEQ ID NO: 7857 | 0.24% | 30 |
| 18 | 1049 | SEQ ID NO: 7858 | 0.22% | 27 |
| 19 | 2200 | SEQ ID NO: 7859 | 0.22% | 27 |
| 20 | 2598 | SEQ ID NO: 7860 | 0.22% | 27 |

HLA A3 - 9 mers

| Maximum possible score using | | | | 12150 |
|---|---|---|---|---|
| this molecule type | | | | |
| 1 | 392 | SEQ ID NO: 7861 | 2.46% | 300 |
| 2 | 2230 | SEQ ID NO: 7862 | 1.48% | 180 |
| 3 | 590 | SEQ ID NO: 7863 | 1.11% | 135 |
| 4 | 697 | SEQ ID NO: 7864 | 1.11% | 135 |
| 5 | 919 | SEQ ID NO: 7865 | 0.74% | 90 |
| 6 | 1354 | SEQ ID NO: 7866 | 0.74% | 90 |
| 7 | 1430 | SEQ ID NO: 7867 | 0.74% | 90 |
| 8 | 2534 | SEQ ID NO: 7868 | 0.74% | 90 |
| 9 | 202 | SEQ ID NO: 7869 | 0.49% | 60 |
| 10 | 488 | SEQ ID NO: 7870 | 0.49% | 60 |
| 11 | 922 | SEQ ID NO: 7871 | 0.49% | 60 |
| 12 | 1735 | SEQ ID NO: 7872 | 0.49% | 60 |
| 13 | 2281 | SEQ ID NO: 7873 | 0.49% | 60 |
| 14 | 1894 | SEQ ID NO: 7874 | 0.44% | 54 |
| 15 | 2552 | SEQ ID NO: 7875 | 0.44% | 54 |
| 16 | 555 | SEQ ID NO: 7876 | 0.37% | 45 |
| 17 | 1134 | SEQ ID NO: 7877 | 0.37% | 45 |
| 18 | 1149 | SEQ ID NO: 7878 | 0.29% | 36 |
| 19 | 283 | SEQ ID NO: 7879 | 0.24% | 30 |
| 20 | 917 | SEQ ID NO: 7880 | 0.24% | 30 |

HLA A3 - 10 mers

| Maximum possible score using | | | | 1596.672 |
|---|---|---|---|---|
| this molecule type | | | | |
| 1 | 2375 | SEQ ID NO: 7881 | 36.07% | 576 |
| 2 | 1751 | SEQ ID NO: 7882 | 28.93% | 462 |
| 3 | 195 | SEQ ID NO: 7883 | 25.05% | 400 |
| 4 | 2306 | SEQ ID NO: 7884 | 21.04% | 336 |
| 5 | 806 | SEQ ID NO: 7885 | 20.66% | 330 |
| 6 | 1252 | SEQ ID NO: 7886 | 18.78% | 300 |
| 7 | 160 | SEQ ID NO: 7887 | 15.03% | 240 |
| 8 | 517 | SEQ ID NO: 7888 | 15.03% | 240 |
| 9 | 375 | SEQ ID NO: 7889 | 12.52% | 200 |
| 10 | 1275 | SEQ ID NO: 7890 | 12.52% | 200 |
| 11 | 2175 | SEQ ID NO: 7891 | 12.52% | 200 |
| 12 | 2207 | SEQ ID NO: 7892 | 12.52% | 200 |
| 13 | 2343 | SEQ ID NO: 7893 | 12.52% | 200 |
| 14 | 443 | SEQ ID NO: 7894 | 11.27% | 180 |
| 15 | 668 | SEQ ID NO: 7895 | 7.51% | 120 |
| 16 | 1825 | SEQ ID NO: 7896 | 6.88% | 110 |
| 17 | 1690 | SEQ ID NO: 7897 | 4.69% | 75 |
| 18 | 159 | SEQ ID NO: 7898 | 3.75% | 60 |
| 19 | 2550 | SEQ ID NO: 7899 | 3.75% | 60 |
| 20 | 1949 | SEQ ID NO: 7900 | 3.38% | 54 |

HLA A24 - 9 mers

| Maximum possible score using | | | | 1596.672 |
|---|---|---|---|---|
| this molecule type | | | | |
| 1 | 641 | SEQ ID NO: 7901 | 45.09% | 720 |
| 2 | 809 | SEQ ID NO: 7902 | 24.80% | 396 |
| 3 | 1209 | SEQ ID NO: 7903 | 22.54% | 360 |
| 4 | 216 | SEQ ID NO: 7904 | 18.03% | 288 |
| 5 | 159 | SEQ ID NO: 7905 | 15.03% | 240 |
| 6 | 528 | SEQ ID NO: 7906 | 15.03% | 240 |
| 7 | 799 | SEQ ID NO: 7907 | 15.03% | 240 |
| 8 | 1436 | SEQ ID NO: 7908 | 15.03% | 240 |
| 9 | 2219 | SEQ ID NO: 7909 | 15.03% | 240 |
| 10 | 1065 | SEQ ID NO: 7910 | 13.77% | 220 |
| 11 | 1953 | SEQ ID NO: 7911 | 13.15% | 210 |
| 12 | 1966 | SEQ ID NO: 7912 | 12.52% | 200 |
| 13 | 2600 | SEQ ID NO: 7913 | 12.52% | 200 |
| 14 | 71 | SEQ ID NO: 7914 | 9.39% | 150 |
| 15 | 380 | SEQ ID NO: 7915 | 9.39% | 150 |
| 16 | 1989 | SEQ ID NO: 7916 | 9.39% | 150 |
| 17 | 342 | SEQ ID NO: 7917 | 8.76% | 140 |
| 18 | 1071 | SEQ ID NO: 7918 | 8.76% | 140 |
| 19 | 2570 | SEQ ID NO: 7919 | 6.88% | 110 |
| 20 | 2550 | SEQ ID NO: 7920 | 6.26% | 100 |

HLA A24 - 10 mers

| Maximum possible score using | | | | 3925227.1 |
|---|---|---|---|---|
| this molecule type | | | | |
| 1 | 1632 | SEQ ID NO: 7921 | 0.09% | 3607.31448 |
| 2 | 1640 | SEQ ID NO: 7922 | 0.04% | 1748.2560912 |
| 3 | 1776 | SEQ ID NO: 7923 | 0.03% | 1492.58592 |
| 4 | 2512 | SEQ ID NO: 7924 | 0.03% | 1434.16845 |
| 5 | 1073 | SEQ ID NO: 7925 | 0.03% | 1338.876 |
| 6 | 230 | SEQ ID NO: 7926 | 0.01% | 685.78272 |
| 7 | 1001 | SEQ ID NO: 7927 | 0.01% | 559.8936 |
| 8 | 716 | SEQ ID NO: 7928 | 0.01% | 558.27486 |
| 9 | 2280 | SEQ ID NO: 7929 | 0.01% | 511.19781048 |
| 10 | 590 | SEQ ID NO: 7930 | 0.01% | 469.6692 |
| 11 | 664 | SEQ ID NO: 7931 | 0.01% | 442.076389524 |
| 12 | 1094 | SEQ ID NO: 7932 | 0.00% | 382.536 |
| 13 | 1735 | SEQ ID NO: 7933 | 0.00% | 382.536 |
| 14 | 1625 | SEQ ID NO: 7934 | 0.00% | 342.4606344 |
| 15 | 1974 | SEQ ID NO: 7935 | 0.00% | 336.885048 |
| 16 | 2382 | SEQ ID NO: 7936 | 0.00% | 319.9392 |
| 17 | 2417 | SEQ ID NO: 7937 | 0.00% | 319.9392 |
| 18 | 744 | SEQ ID NO: 7938 | 0.00% | 256.416670125 |
| 19 | 108 | SEQ ID NO: 7939 | 0.00% | 232.52724 |
| 20 | 390 | SEQ ID NO: 7940 | 0.00% | 228.0411084 |

HLA A 0201 - 9 mers

| Maximum possible score using | | | | 3925227.1 |
|---|---|---|---|---|
| this molecule type | | | | |
| 1 | 2511 | SEQ ID NO: 7941 | 0.38% | 15126.90795 |
| 2 | 1608 | SEQ ID NO: 7942 | 0.05% | 2049.4656 |
| 3 | 2572 | SEQ ID NO: 7943 | 0.04% | 1879.5921264 |
| 4 | 255 | SEQ ID NO: 7944 | 0.03% | 1566.6522795 |
| 5 | 895 | SEQ ID NO: 7945 | 0.03% | 1338.876 |
| 6 | 1171 | SEQ ID NO: 7946 | 0.02% | 1107.960876 |
| 7 | 1691 | SEQ ID NO: 7947 | 0.01% | 782.95521024 |
| 8 | 20 | SEQ ID NO: 7948 | 0.01% | 549.9372312 |
| 9 | 1632 | SEQ ID NO: 7949 | 0.01% | 479.041993296 |
| 10 | 2280 | SEQ ID NO: 7950 | 0.01% | 472.418344576987 |
| 11 | 1963 | SEQ ID NO: 7951 | 0.00% | 358.73928 |
| 12 | 1955 | SEQ ID NO: 7952 | 0.00% | 331.093464 |
| 13 | 741 | SEQ ID NO: 7953 | 0.00% | 318.652488 |
| 14 | 523 | SEQ ID NO: 7954 | 0.00% | 278.7876 |
| 15 | 1073 | SEQ ID NO: 7955 | 0.00% | 266.6988828 |
| 16 | 2489 | SEQ ID NO: 7956 | 0.00% | 243.432 |
| 17 | 777 | SEQ ID NO: 7957 | 0.00% | 218.5730664 |
| 18 | 1737 | SEQ ID NO: 7958 | 0.00% | 218.0785572 |
| 19 | 589 | SEQ ID NO: 7959 | 0.00% | 210.538251 |
| 20 | 229 | SEQ ID NO: 7960 | 0.00% | 205.230564 |

HLA A 0201 - 10 mers

| Maximum possible score using | | | | 36 |
|---|---|---|---|---|
| this molecule type | | | | |
| 1 | 2337 | SEQ ID NO: 7961 | 33.33% | 12 |
| 2 | 2156 | SEQ ID NO: 7962 | 25% | 9 |
| 3 | 492 | SEQ ID NO: 7963 | 20% | 7.2 |
| 4 | 18 | SEQ ID NO: 7964 | 16.66% | 6 |
| 5 | 332 | SEQ ID NO: 7965 | 16.66% | 6 |
| 6 | 415 | SEQ ID NO: 7966 | 16.66% | 6 |
| 7 | 2479 | SEQ ID NO: 7967 | 16.66% | 6 |
| 8 | 1495 | SEQ ID NO: 7968 | 11.11% | 4 |
| 9 | 2035 | SEQ ID NO: 7969 | 11.11% | 4 |
| 10 | 1349 | SEQ ID NO: 7970 | 10% | 3.6 |
| 11 | 1194 | SEQ ID NO: 7971 | 8.33% | 3 |
| 12 | 1648 | SEQ ID NO: 7972 | 8.33% | 3 |
| 13 | 96 | SEQ ID NO: 7973 | 6.66% | 2.4 |
| 14 | 764 | SEQ ID NO: 7974 | 6.66% | 2.4 |
| 15 | 986 | SEQ ID NO: 7975 | 6.66% | 2.4 |
| 16 | 2345 | SEQ ID NO: 7976 | 6.66% | 2.4 |
| 17 | 698 | SEQ ID NO: 7977 | 5.55% | 2 |
| 18 | 1355 | SEQ ID NO: 7978 | 5.55% | 2 |
| 19 | 1987 | SEQ ID NO: 7979 | 5.55% | 2 |
| 20 | 2085 | SEQ ID NO: 7980 | 5.55% | 2 |

HLA A 1101 - 9 mers

| Maximum possible score using | | | | 36 |
|---|---|---|---|---|
| this molecule type | | | | |
| 1 | 2083 | SEQ ID NO: 7981 | 33.33% | 12 |
| 2 | 2123 | SEQ ID NO: 7982 | 25% | 9 |
| 3 | 2147 | SEQ ID NO: 7983 | 16.66% | 6 |
| 4 | 331 | SEQ ID NO: 7984 | 12.5% | 4.5 |
| 5 | 1035 | SEQ ID NO: 7985 | 11.11% | 4 |
| 6 | 1064 | SEQ ID NO: 7986 | 11.11% | 4 |
| 7 | 2154 | SEQ ID NO: 7987 | 11.11% | 4 |
| 8 | 1048 | SEQ ID NO: 7988 | 7.5% | 2.7 |
| 9 | 202 | SEQ ID NO: 7989 | 6.66% | 2.4 |
| 10 | 721 | SEQ ID NO: 7990 | 6.66% | 2.4 |
| 11 | 2109 | SEQ ID NO: 7991 | 6.66% | 2.4 |
| 12 | 2230 | SEQ ID NO: 7992 | 6.66% | 2.4 |
| 13 | 1306 | SEQ ID NO: 7993 | 5.55% | 2 |
| 14 | 1622 | SEQ ID NO: 7994 | 5.55% | 2 |
| 15 | 1772 | SEQ ID NO: 7995 | 5.55% | 2 |
| 16 | 1796 | SEQ ID NO: 7996 | 5.55% | 2 |
| 17 | 186 | SEQ ID NO: 7997 | 5% | 1.8 |
| 18 | 414 | SEQ ID NO: 7998 | 5% | 1.8 |
| 19 | 697 | SEQ ID NO: 7999 | 5% | 1.8 |
| 20 | 1175 | SEQ ID NO: 8000 | 5% | 1.8 |

HLA A 1101 - 10 mers

| Maximum possible score using | | | | 5400 |
|---|---|---|---|---|
| this molecule type | | | | |
| 1 | 1447 | SEQ ID NO: 8001 | 14.81% | 800 |
| 2 | 642 | SEQ ID NO: 8002 | 3.70% | 200 |
| 3 | 34 | SEQ ID NO: 8003 | 2.22% | 120 |
| 4 | 186 | SEQ ID NO: 8004 | 1.48% | 80 |
| 5 | 244 | SEQ ID NO: 8005 | 1.48% | 80 |
| 6 | 459 | SEQ ID NO: 8006 | 1.48% | 80 |
| 7 | 1475 | SEQ ID NO: 8007 | 1.48% | 80 |
| 8 | 1867 | SEQ ID NO: 8008 | 1.48% | 80 |
| 9 | 2032 | SEQ ID NO: 8009 | 1.48% | 80 |
| 10 | 2047 | SEQ ID NO: 8010 | 1.48% | 80 |
| 11 | 2335 | SEQ ID NO: 8011 | 1.48% | 80 |
| 12 | 622 | SEQ ID NO: 8012 | 1.11% | 60 |
| 13 | 1375 | SEQ ID NO: 8013 | 1.11% | 60 |
| 14 | 1617 | SEQ ID NO: 8014 | 0.92% | 50 |
| 15 | 1023 | SEQ ID NO: 8015 | 0.83% | 45 |
| 16 | 286 | SEQ ID NO: 8016 | 0.74% | 40 |
| 17 | 490 | SEQ ID NO: 8017 | 0.74% | 40 |
| 18 | 810 | SEQ ID NO: 8018 | 0.74% | 40 |
| 19 | 1420 | SEQ ID NO: 8019 | 0.74% | 40 |
| 20 | 1854 | SEQ ID NO: 8020 | 0.74% | 40 |

HLA B7 - 9 mers

| Maximum possible score using | | | | 5400 |
|---|---|---|---|---|
| this molecule type | | | | |
| 1 | 1617 | SEQ ID NO: 8021 | 3.70% | 200 |
| 2 | 752 | SEQ ID NO: 8022 | 2.22% | 120 |
| 3 | 1552 | SEQ ID NO: 8023 | 2.22% | 120 |
| 4 | 154 | SEQ ID NO: 8024 | 1.48% | 80 |
| 5 | 165 | SEQ ID NO: 8025 | 1.48% | 80 |
| 6 | 383 | SEQ ID NO: 8026 | 1.48% | 80 |
| 7 | 1501 | SEQ ID NO: 8027 | 1.48% | 80 |
| 8 | 2093 | SEQ ID NO: 8028 | 1.48% | 80 |
| 9 | 2564 | SEQ ID NO: 8029 | 1.48% | 80 |
| 10 | 622 | SEQ ID NO: 8030 | 1.11% | 60 |
| 11 | 1086 | SEQ ID NO: 8031 | 1.11% | 60 |
| 12 | 1262 | SEQ ID NO: 8032 | 1.11% | 60 |
| 13 | 1556 | SEQ ID NO: 8033 | 1.11% | 60 |
| 14 | 845 | SEQ ID NO: 8034 | 1% | 54 |
| 15 | 286 | SEQ ID NO: 8035 | 0.74% | 40 |
| 16 | 490 | SEQ ID NO: 8036 | 0.74% | 40 |
| 17 | 552 | SEQ ID NO: 8037 | 0.74% | 40 |
| 18 | 1858 | SEQ ID NO: 8038 | 0.74% | 40 |
| 19 | 2107 | SEQ ID NO: 8039 | 0.74% | 40 |
| 20 | 2582 | SEQ ID NO: 8040 | 0.74% | 40 |

[1676] TABLE 16
Epitopes for SEQ ID NO: 6042

| | | | | |
|---|---|---|---|---|
| | Start | | % of max. | |
| Rank | position | Sequence | score | Score |

HLA A1 - 9 mers

| Maximum possible score using this molecule type | | | | 5625 |
|---|---|---|---|---|
| 1 | 846 | SEQ ID NO: 8041 | 2.22% | 125 |
| 2 | 798 | SEQ ID NO: 8042 | 1.6% | 90 |
| 3 | 787 | SEQ ID NO: 8043 | 0.88% | 50 |
| 4 | 1178 | SEQ ID NO: 8044 | 0.88% | 50 |
| 5 | 637 | SEQ ID NO: 8045 | 0.8% | 45 |
| 6 | 557 | SEQ ID NO: 8046 | 0.44% | 25 |
| 7 | 1020 | SEQ ID NO: 8047 | 0.44% | 25 |
| 8 | 282 | SEQ ID NO: 8048 | 0.32% | 18 |
| 9 | 1241 | SEQ ID NO: 8049 | 0.24% | 13.5 |
| 10 | 466 | SEQ ID NO: 8050 | 0.22% | 12.5 |
| 11 | 727 | SEQ ID NO: 8051 | 0.2% | 11.25 |
| 12 | 706 | SEQ ID NO: 8052 | 0.17% | 10 |
| 13 | 324 | SEQ ID NO: 8053 | 0.16% | 9 |
| 14 | 752 | SEQ ID NO: 8054 | 0.16% | 9 |
| 15 | 54 | SEQ ID NO: 8055 | 0.13% | 7.5 |
| 16 | 554 | SEQ ID NO: 8056 | 0.13% | 7.5 |
| 17 | 590 | SEQ ID NO: 8057 | 0.12% | 6.75 |
| 18 | 569 | SEQ ID NO: 8058 | 0.08% | 5 |
| 19 | 613 | SEQ ID NO: 8059 | 0.08% | 5 |
| 20 | 90 | SEQ ID NO: 8060 | 0.08% | 4.5 |

HLA A1 - 10 mers

| Maximum possible score using this molecule type | | | | 5625 |
|---|---|---|---|---|
| 1 | 1241 | SEQ ID NO: 8061 | 4.8% | 270 |
| 2 | 967 | SEQ ID NO: 8062 | 0.8% | 45 |
| 3 | 1010 | SEQ ID NO: 8063 | 0.48% | 27 |
| 4 | 426 | SEQ ID NO: 8064 | 0.44% | 25 |
| 5 | 809 | SEQ ID NO: 8065 | 0.44% | 25 |
| 6 | 1178 | SEQ ID NO: 8066 | 0.44% | 25 |
| 7 | 787 | SEQ ID NO: 8067 | 0.22% | 12.5 |
| 8 | 958 | SEQ ID NO: 8068 | 0.22% | 12.5 |
| 9 | 727 | SEQ ID NO: 8069 | 0.2% | 11.25 |
| 10 | 610 | SEQ ID NO: 8070 | 0.17% | 10 |
| 11 | 12 | SEQ ID NO: 8071 | 0.13% | 7.5 |
| 12 | 1181 | SEQ ID NO: 8072 | 0.12% | 6.75 |
| 13 | 373 | SEQ ID NO: 8073 | 0.11% | 6.25 |
| 14 | 602 | SEQ ID NO: 8074 | 0.11% | 6.25 |
| 15 | 20 | SEQ ID NO: 8075 | 0.04% | 2.5 |
| 16 | 32 | SEQ ID NO: 8076 | 0.04% | 2.5 |
| 17 | 53 | SEQ ID NO: 8077 | 0.04% | 2.5 |
| 18 | 400 | SEQ ID NO: 8078 | 0.04% | 2.5 |
| 19 | 557 | SEQ ID NO: 8079 | 0.04% | 2.5 |
| 20 | 667 | SEQ ID NO: 8080 | 0.04% | 2.5 |

HLA A3 - 9 mers

| Maximum possible score using this molecule type | | | | 12150 |
|---|---|---|---|---|
| 1 | 768 | SEQ ID NO: 8081 | 0.82% | 100 |
| 2 | 808 | SEQ ID NO: 8082 | 0.49% | 60 |
| 3 | 85 | SEQ ID NO: 8083 | 0.24% | 30 |
| 4 | 663 | SEQ ID NO: 8084 | 0.24% | 30 |
| 5 | 1245 | SEQ ID NO: 8085 | 0.14% | 18 |
| 6 | 288 | SEQ ID NO: 8086 | 0.09% | 12 |
| 7 | 50 | SEQ ID NO: 8087 | 0.08% | 10 |
| 8 | 320 | SEQ ID NO: 8088 | 0.07% | 9 |
| 9 | 402 | SEQ ID NO: 8089 | 0.07% | 9 |
| 10 | 798 | SEQ ID NO: 8090 | 0.07% | 9 |
| 11 | 902 | SEQ ID NO: 8091 | 0.06% | 8.1 |
| 12 | 364 | SEQ ID NO: 8092 | 0.05% | 6.75 |
| 13 | 297 | SEQ ID NO: 8093 | 0.04% | 6 |
| 14 | 992 | SEQ ID NO: 8094 | 0.04% | 6 |
| 15 | 38 | SEQ ID NO: 8095 | 0.03% | 4.5 |
| 16 | 249 | SEQ ID NO: 8096 | 0.03% | 4.5 |
| 17 | 706 | SEQ ID NO: 8097 | 0.03% | 4.05 |
| 18 | 1204 | SEQ ID NO: 8098 | 0.03% | 4.05 |
| 19 | 1178 | SEQ ID NO: 8099 | 0.03% | 4 |
| 20 | 343 | SEQ ID NO: 8100 | 0.02% | 3.6 |

HLA A3 - 10 mers

| Maximum possible score using this molecule type | | | | 12150 |
|---|---|---|---|---|
| 1 | 255 | SEQ ID NO: 8101 | 1.48% | 180 |
| 2 | 180 | SEQ ID NO: 8102 | 0.55% | 67.5 |
| 3 | 768 | SEQ ID NO: 8103 | 0.49% | 60 |
| 4 | 1177 | SEQ ID NO: 8104 | 0.49% | 60 |
| 5 | 380 | SEQ ID NO: 8105 | 0.24% | 30 |
| 6 | 100 | SEQ ID NO: 8106 | 0.18% | 22.5 |
| 7 | 786 | SEQ ID NO: 8107 | 0.16% | 20 |
| 8 | 1217 | SEQ ID NO: 8108 | 0.16% | 20 |
| 9 | 207 | SEQ ID NO: 8109 | 0.14% | 18 |
| 10 | 1183 | SEQ ID NO: 8110 | 0.14% | 18 |
| 11 | 38 | SEQ ID NO: 8111 | 0.09% | 12 |
| 12 | 52 | SEQ ID NO: 8112 | 0.09% | 12 |
| 13 | 8 | SEQ ID NO: 8113 | 0.06% | 8 |
| 14 | 679 | SEQ ID NO: 8114 | 0.06% | 8 |
| 15 | 73 | SEQ ID NO: 8115 | 0.05% | 6.75 |
| 16 | 1204 | SEQ ID NO: 8116 | 0.05% | 6.075 |
| 17 | 50 | SEQ ID NO: 8117 | 0.04% | 6 |
| 18 | 774 | SEQ ID NO: 8118 | 0.04% | 6 |
| 19 | 845 | SEQ ID NO: 8119 | 0.04% | 6 |
| 20 | 214 | SEQ ID NO: 8120 | 0.04% | 5.4 |

HLA A24 - 9 mers

| Maximum possible score using this molecule type | | | | 1596.672 |
|---|---|---|---|---|
| 1 | 1118 | SEQ ID NO: 8121 | 19.84% | 316.8 |
| 2 | 51 | SEQ ID NO: 8122 | 18.78% | 300 |
| 3 | 161 | SEQ ID NO: 8123 | 18.78% | 300 |
| 4 | 434 | SEQ ID NO: 8124 | 18.78% | 300 |
| 5 | 365 | SEQ ID NO: 8125 | 13.77% | 220 |
| 6 | 736 | SEQ ID NO: 8126 | 12.52% | 200 |
| 7 | 620 | SEQ ID NO: 8127 | 7.51% | 120 |
| 8 | 1068 | SEQ ID NO: 8128 | 7.51% | 120 |
| 9 | 817 | SEQ ID NO: 8129 | 3.75% | 60 |
| 10 | 336 | SEQ ID NO: 8130 | 3.44% | 55 |
| 11 | 687 | SEQ ID NO: 8131 | 3.13% | 50 |
| 12 | 254 | SEQ ID NO: 8132 | 2.34% | 37.5 |
| 13 | 627 | SEQ ID NO: 8133 | 1.87% | 30 |
| 14 | 950 | SEQ ID NO: 8134 | 1.75% | 28 |
| 15 | 28 | SEQ ID NO: 8135 | 1.56% | 25 |
| 16 | 408 | SEQ ID NO: 8136 | 1.56% | 25 |
| 17 | 159 | SEQ ID NO: 8137 | 1.31% | 21 |
| 18 | 1166 | SEQ ID NO: 8138 | 1.26% | 20.16 |
| 19 | 45 | SEQ ID NO: 8139 | 1.25% | 20 |
| 20 | 185 | SEQ ID NO: 8140 | 1.25% | 20 |

HLA A24 - 10 mers

| Maximum possible score using this molecule type | | | | 1596.672 |
|---|---|---|---|---|
| 1 | 438 | SEQ ID NO: 8141 | 27.55% | 440 |
| 2 | 489 | SEQ ID NO: 8142 | 22.54% | 360 |
| 3 | 254 | SEQ ID NO: 8143 | 18.78% | 300 |
| 4 | 354 | SEQ ID NO: 8144 | 11.27% | 180 |
| 5 | 406 | SEQ ID NO: 8145 | 11.27% | 180 |
| 6 | 1047 | SEQ ID NO: 8146 | 11.27% | 180 |
| 7 | 473 | SEQ ID NO: 8147 | 7.51% | 120 |
| 8 | 350 | SEQ ID NO: 8148 | 6.26% | 100 |
| 9 | 769 | SEQ ID NO: 8149 | 6.26% | 100 |
| 10 | 193 | SEQ ID NO: 8150 | 5.63% | 90 |
| 11 | 479 | SEQ ID NO: 8151 | 3.13% | 50 |
| 12 | 0 | SEQ ID NO: 8152 | 2.70% | 43.2 |
| 13 | 813 | SEQ ID NO: 8153 | 1.87% | 30 |
| 14 | 739 | SEQ ID NO: 8154 | 1.50% | 24 |
| 15 | 782 | SEQ ID NO: 8155 | 1.50% | 24 |
| 16 | 1186 | SEQ ID NO: 8156 | 1.31% | 21 |
| 17 | 910 | SEQ ID NO: 8157 | 1.05% | 16.8 |
| 18 | 128 | SEQ ID NO: 8158 | 0.93% | 15 |
| 19 | 183 | SEQ ID NO: 8159 | 0.93% | 15 |
| 20 | 1069 | SEQ ID NO: 8160 | 0.93% | 15 |

HLA A 0201 - 9 mers

| Maximum possible score using this molecule type | | | | 3925227.1 |
|---|---|---|---|---|
| 1 | 1041 | SEQ ID NO: 8161 | 0.01% | 484.2379773 |
| 2 | 981 | SEQ ID NO: 8162 | 0.00% | 382.536 |
| 3 | 957 | SEQ ID NO: 8163 | 0.00% | 342.4606344 |
| 4 | 896 | SEQ ID NO: 8164 | 0.00% | 232.6931712 |
| 5 | 1173 | SEQ ID NO: 8165 | 0.00% | 201.447432 |
| 6 | 733 | SEQ ID NO: 8166 | 0.00% | 171.86796 |
| 7 | 410 | SEQ ID NO: 8167 | 0.00% | 135.45252 |
| 8 | 786 | SEQ ID NO: 8168 | 0.00% | 119.463012 |
| 9 | 150 | SEQ ID NO: 8169 | 0.00% | 102.17550222 |
| 10 | 1 | SEQ ID NO: 8170 | 0.00% | 94.98737754 |
| 11 | 595 | SEQ ID NO: 8171 | 0.00% | 93.239424 |
| 12 | 1095 | SEQ ID NO: 8172 | 0.00% | 89.41779 |
| 13 | 1166 | SEQ ID NO: 8173 | 0.00% | 87.58584 |
| 14 | 845 | SEQ ID NO: 8174 | 0.00% | 79.642008 |
| 15 | 734 | SEQ ID NO: 8175 | 0.00% | 73.47672 |
| 16 | 802 | SEQ ID NO: 8176 | 0.00% | 71.872056 |
| 17 | 1213 | SEQ ID NO: 8177 | 0.00% | 71.872056 |
| 18 | 105 | SEQ ID NO: 8178 | 0.00% | 50.232 |
| 19 | 939 | SEQ ID NO: 8179 | 0.00% | 49.13352 |
| 20 | 130 | SEQ ID NO: 8180 | 0.00% | 48.732354 |

HLA A 0201 - 10 mers

| Maximum possible score using this molecule type | | | | 3925227.1 |
|---|---|---|---|---|
| 1 | 372 | SEQ ID NO: 8181 | 0.04% | 1896.33528 |
| 2 | 410 | SEQ ID NO: 8182 | 0.02% | 1134.00849744 |
| 3 | 162 | SEQ ID NO: 8183 | 0.01% | 685.3897512 |
| 4 | 1076 | SEQ ID NO: 8184 | 0.01% | 640.90320525 |
| 5 | 1196 | SEQ ID NO: 8185 | 0.01% | 623.742666372 |
| 6 | 353 | SEQ ID NO: 8186 | 0.01% | 446.7384576 |
| 7 | 50 | SEQ ID NO: 8187 | 0.00% | 375.97824 |
| 8 | 733 | SEQ ID NO: 8188 | 0.00% | 271.863864 |
| 9 | 130 | SEQ ID NO: 8189 | 0.00% | 235.6873848 |
| 10 | 415 | SEQ ID NO: 8190 | 0.00% | 185.679 |
| 11 | 297 | SEQ ID NO: 8191 | 0.00% | 177.496704 |
| 12 | 1 | SEQ ID NO: 8192 | 0.00% | 152.42160582 |
| 13 | 56 | SEQ ID NO: 8193 | 0.00% | 110.013876 |
| 14 | 732 | SEQ ID NO: 8194 | 0.00% | 101.0988 |
| 15 | 6 | SEQ ID NO: 8195 | 0.00% | 98.26704 |
| 16 | 261 | SEQ ID NO: 8196 | 0.00% | 91.60164 |
| 17 | 1040 | SEQ ID NO: 8197 | 0.00% | 76.98537 |
| 18 | 928 | SEQ ID NO: 8198 | 0.00% | 71.2908 |
| 19 | 1188 | SEQ ID NO: 8199 | 0.00% | 69.81282 |
| 20 | 1094 | SEQ ID NO: 8200 | 0.00% | 52.5987 |

HLA A 1101 - 9 mers

| Maximum possible score using this molecule type | | | | 36 |
|---|---|---|---|---|
| 1 | 402 | SEQ ID NO: 8201 | 25% | 9 |
| 2 | 902 | SEQ ID NO: 8202 | 22.5% | 8.1 |
| 3 | 288 | SEQ ID NO: 8203 | 11.11% | 4 |
| 4 | 85 | SEQ ID NO: 8204 | 6.66% | 2.4 |
| 5 | 706 | SEQ ID NO: 8205 | 6.66% | 2.4 |
| 6 | 456 | SEQ ID NO: 8206 | 5.55% | 2 |
| 7 | 920 | SEQ ID NO: 8207 | 5.55% | 2 |
| 8 | 535 | SEQ ID NO: 8208 | 5% | 1.8 |
| 9 | 364 | SEQ ID NO: 8209 | 3.33% | 1.2 |
| 10 | 438 | SEQ ID NO: 8210 | 3.33% | 1.2 |
| 11 | 798 | SEQ ID NO: 8211 | 3.33% | 1.2 |
| 12 | 808 | SEQ ID NO: 8212 | 3.33% | 1.2 |
| 13 | 937 | SEQ ID NO: 8213 | 3.33% | 1.2 |
| 14 | 956 | SEQ ID NO: 8214 | 3.33% | 1.2 |
| 15 | 557 | SEQ ID NO: 8215 | 2.77% | 1 |
| 16 | 1218 | SEQ ID NO: 8216 | 2.77% | 1 |
| 17 | 784 | SEQ ID NO: 8217 | 2.5% | 0.9 |
| 18 | 249 | SEQ ID NO: 8218 | 2.22% | 0.8 |
| 19 | 768 | SEQ ID NO: 8219 | 2.22% | 0.8 |
| 20 | 1178 | SEQ ID NO: 8220 | 2.22% | 0.8 |

HLA A 1101 - 10 mers

| Maximum possible score using this molecule type | | | | 36 |
|---|---|---|---|---|
| 1 | 38 | SEQ ID NO: 8221 | 13.33% | 4.8 |
| 2 | 807 | SEQ ID NO: 8222 | 12.5% | 4.5 |
| 3 | 100 | SEQ ID NO: 8223 | 11.11% | 4 |
| 4 | 380 | SEQ ID NO: 8224 | 11.11% | 4 |
| 5 | 767 | SEQ ID NO: 8225 | 10% | 3.6 |
| 6 | 533 | SEQ ID NO: 8226 | 8.33% | 3 |
| 7 | 967 | SEQ ID NO: 8227 | 6.66% | 2.4 |
| 8 | 919 | SEQ ID NO: 8228 | 5.55% | 2 |
| 9 | 305 | SEQ ID NO: 8229 | 5% | 1.8 |
| 10 | 211 | SEQ ID NO: 8230 | 3.33% | 1.2 |
| 11 | 511 | SEQ ID NO: 8231 | 3.33% | 1.2 |
| 12 | 1177 | SEQ ID NO: 8232 | 3.33% | 1.2 |
| 13 | 429 | SEQ ID NO: 8233 | 2.77% | 1 |
| 14 | 758 | SEQ ID NO: 8234 | 2.77% | 1 |
| 15 | 797 | SEQ ID NO: 8235 | 2.5% | 0.9 |
| 16 | 255 | SEQ ID NO: 8236 | 2.22% | 0.8 |
| 17 | 986 | SEQ ID NO: 8237 | 2.22% | 0.8 |
| 18 | 1157 | SEQ ID NO: 8238 | 2.22% | 0.8 |
| 19 | 170 | SEQ ID NO: 8239 | 1.66% | 0.6 |
| 20 | 893 | SEQ ID NO: 8240 | 1.66% | 0.6 |

HLA B7 - 9 mers

| Maximum possible score using this molecule type | | | | 5400 |
|---|---|---|---|---|
| 1 | 200 | SEQ ID NO: 8241 | 1.48% | 80 |
| 2 | 1243 | SEQ ID NO: 8242 | 1.48% | 80 |
| 3 | 123 | SEQ ID NO: 8243 | 0.74% | 40 |
| 4 | 248 | SEQ ID NO: 8244 | 0.66% | 36 |
| 5 | 1036 | SEQ ID NO: 8245 | 0.66% | 36 |
| 6 | 494 | SEQ ID NO: 8246 | 0.37% | 20 |
| 7 | 495 | SEQ ID NO: 8247 | 0.37% | 20 |
| 8 | 523 | SEQ ID NO: 8248 | 0.37% | 20 |
| 9 | 842 | SEQ ID NO: 8249 | 0.37% | 20 |
| 10 | 932 | SEQ ID NO: 8250 | 0.37% | 20 |
| 11 | 274 | SEQ ID NO: 8251 | 0.33% | 18 |
| 12 | 588 | SEQ ID NO: 8252 | 0.22% | 12 |
| 13 | 656 | SEQ ID NO: 8253 | 0.22% | 12 |
| 14 | 657 | SEQ ID NO: 8254 | 0.22% | 12 |
| 15 | 767 | SEQ ID NO: 8255 | 0.22% | 12 |
| 16 | 911 | SEQ ID NO: 8256 | 0.22% | 12 |
| 17 | 939 | SEQ ID NO: 8257 | 0.22% | 12 |
| 18 | 1007 | SEQ ID NO: 8258 | 0.22% | 12 |
| 19 | 1170 | SEQ ID NO: 8259 | 0.22% | 12 |
| 20 | 1206 | SEQ ID NO: 8260 | 0.22% | 12 |

HLA B7 - 10 mers

| Maximum possible score using this molecule type | | | | 5400 |
|---|---|---|---|---|
| 1 | 505 | SEQ ID NO: 8261 | 4.44% | 240 |
| 2 | 312 | SEQ ID NO: 8262 | 3.70% | 200 |
| 3 | 141 | SEQ ID NO: 8263 | 1.11% | 60 |
| 4 | 1006 | SEQ ID NO: 8264 | 0.66% | 36 |
| 5 | 411 | SEQ ID NO: 8265 | 0.44% | 24 |
| 6 | 122 | SEQ ID NO: 8266 | 0.37% | 20 |
| 7 | 134 | SEQ ID NO: 8267 | 0.37% | 20 |
| 8 | 184 | SEQ ID NO: 8268 | 0.37% | 20 |
| 9 | 367 | SEQ ID NO: 8269 | 0.37% | 20 |
| 10 | 402 | SEQ ID NO: 8270 | 0.37% | 20 |
| 11 | 494 | SEQ ID NO: 8271 | 0.37% | 20 |
| 12 | 560 | SEQ ID NO: 8272 | 0.37% | 20 |
| 13 | 626 | SEQ ID NO: 8273 | 0.37% | 20 |
| 14 | 931 | SEQ ID NO: 8274 | 0.37% | 20 |
| 15 | 956 | SEQ ID NO: 8275 | 0.37% | 20 |
| 16 | 1117 | SEQ ID NO: 8276 | 0.37% | 20 |
| 17 | 1169 | SEQ ID NO: 8277 | 0.37% | 20 |
| 18 | 1196 | SEQ ID NO: 8278 | 0.37% | 20 |
| 19 | 247 | SEQ ID NO: 8279 | 0.22% | 12 |
| 20 | 273 | SEQ ID NO: 8280 | 0.22% | 12 |

[1677] TABLE 17
Epitopes for SEQ ID NO: 6043

| | | | | |
|---|---|---|---|---|
| | Start | | % of max. | |
| Rank | position | Sequence | score | Score |

HLA A1 - 9 mers

| Maximum possible score using this molecule type | | | | 5625 |
|---|---|---|---|---|
| 1 | 168 | SEQ ID NO: 8281 | 0.2% | 11.25 |
| 2 | 212 | SEQ ID NO: 8282 | 0.08% | 4.5 |
| 3 | 223 | SEQ ID NO: 8283 | 0.08% | 4.5 |
| 4 | 104 | SEQ ID NO: 8284 | 0.04% | 2.5 |
| 5 | 170 | SEQ ID NO: 8285 | 0.04% | 2.5 |
| 6 | 99 | SEQ ID NO: 8286 | 0.04% | 2.25 |
| 7 | 188 | SEQ ID NO: 8287 | 0.02% | 1.35 |
| 8 | 180 | SEQ ID NO: 8288 | 0.02% | 1.25 |
| 9 | 219 | SEQ ID NO: 8289 | 0.02% | 1.25 |
| 10 | 18 | SEQ ID NO: 8290 | 0.01% | 1 |
| 11 | 226 | SEQ ID NO: 8291 | 0.01% | 1 |
| 12 | 98 | SEQ ID NO: 8292 | 0.01% | 0.625 |
| 13 | 151 | SEQ ID NO: 8293 | 0.01% | 0.625 |
| 14 | 10 | SEQ ID NO: 8294 | 0.01% | 0.6 |
| 15 | 13 | SEQ ID NO: 8295 | 0.00% | 0.5 |
| 16 | 32 | SEQ ID NO: 8296 | 0.00% | 0.5 |
| 17 | 70 | SEQ ID NO: 8297 | 0.00% | 0.5 |
| 18 | 78 | SEQ ID NO: 8298 | 0.00% | 0.5 |
| 19 | 82 | SEQ ID NO: 8299 | 0.00% | 0.5 |
| 20 | 145 | SEQ ID NO: 8300 | 0.00% | 0.5 |

HLA A1 - 10 mers

| Maximum possible score using this molecule type | | | | 5625 |
|---|---|---|---|---|
| 1 | 99 | SEQ ID NO: 8301 | 0.8% | 45 |
| 2 | 223 | SEQ ID NO: 8302 | 0.8% | 45 |
| 3 | 188 | SEQ ID NO: 8303 | 0.48% | 27 |
| 4 | 206 | SEQ ID NO: 8304 | 0.2% | 11.25 |
| 5 | 253 | SEQ ID NO: 8305 | 0.17% | 10 |
| 6 | 174 | SEQ ID NO: 8306 | 0.13% | 7.5 |
| 7 | 97 | SEQ ID NO: 8307 | 0.04% | 2.5 |
| 8 | 257 | SEQ ID NO: 8308 | 0.04% | 2.5 |
| 9 | 179 | SEQ ID NO: 8309 | 0.04% | 2.25 |
| 10 | 162 | SEQ ID NO: 8310 | 0.02% | 1.25 |
| 11 | 196 | SEQ ID NO: 8311 | 0.02% | 1.25 |
| 12 | 219 | SEQ ID NO: 8312 | 0.02% | 1.25 |
| 13 | 18 | SEQ ID NO: 8313 | 0.01% | 1 |
| 14 | 246 | SEQ ID NO: 8314 | 0.01% | 1 |
| 15 | 38 | SEQ ID NO: 8315 | 0.01% | 0.75 |
| 16 | 33 | SEQ ID NO: 8316 | 0.00% | 0.5 |
| 17 | 69 | SEQ ID NO: 8317 | 0.00% | 0.5 |
| 18 | 81 | SEQ ID NO: 8318 | 0.00% | 0.5 |
| 19 | 104 | SEQ ID NO: 8319 | 0.00% | 0.5 |
| 20 | 116 | SEQ ID NO: 8320 | 0.00% | 0.5 |

HLA A3 - 9 mers

| Maximum possible score using this molecule type | | | | 12150 |
|---|---|---|---|---|
| 1 | 104 | SEQ ID NO: 8321 | 0.98% | 120 |
| 2 | 123 | SEQ ID NO: 8322 | 0.74% | 90 |
| 3 | 82 | SEQ ID NO: 8323 | 0.44% | 54 |
| 4 | 106 | SEQ ID NO: 8324 | 0.11% | 13.5 |
| 5 | 99 | SEQ ID NO: 8325 | 0.08% | 10.8 |
| 6 | 127 | SEQ ID NO: 8326 | 0.08% | 10 |
| 7 | 71 | SEQ ID NO: 8327 | 0.07% | 9 |
| 8 | 1 | SEQ ID NO: 8328 | 0.06% | 8.1 |
| 9 | 113 | SEQ ID NO: 8329 | 0.04% | 6 |
| 10 | 84 | SEQ ID NO: 8330 | 0.03% | 4.5 |
| 11 | 109 | SEQ ID NO: 8331 | 0.03% | 4.05 |
| 12 | 58 | SEQ ID NO: 8332 | 0.02% | 3 |
| 13 | 138 | SEQ ID NO: 8333 | 0.02% | 3 |
| 14 | 44 | SEQ ID NO: 8334 | 0.02% | 2.7 |
| 15 | 81 | SEQ ID NO: 8335 | 0.02% | 2.7 |
| 16 | 226 | SEQ ID NO: 8336 | 0.02% | 2.7 |
| 17 | 184 | SEQ ID NO: 8337 | 0.01% | 1.8 |
| 18 | 102 | SEQ ID NO: 8338 | 0.01% | 1.215 |
| 19 | 39 | SEQ ID NO: 8339 | 0.00% | 1.2 |
| 20 | 234 | SEQ ID NO: 8340 | 0.00% | 0.9 |

HLA A3 - 10 mers

| Maximum possible score using this molecule type | | | | 12150 |
|---|---|---|---|---|
| 1 | 99 | SEQ ID NO: 8341 | 1.33% | 162 |
| 2 | 81 | SEQ ID NO: 8342 | 0.44% | 54 |
| 3 | 104 | SEQ ID NO: 8343 | 0.24% | 30 |
| 4 | 51 | SEQ ID NO: 8344 | 0.16% | 20 |
| 5 | 122 | SEQ ID NO: 8345 | 0.11% | 13.5 |
| 6 | 71 | SEQ ID NO: 8346 | 0.07% | 9 |
| 7 | 69 | SEQ ID NO: 8347 | 0.04% | 6 |
| 8 | 223 | SEQ ID NO: 8348 | 0.04% | 5.4 |
| 9 | 84 | SEQ ID NO: 8349 | 0.03% | 4.5 |
| 10 | 63 | SEQ ID NO: 8350 | 0.02% | 3.6 |
| 11 | 138 | SEQ ID NO: 8351 | 0.02% | 3 |
| 12 | 201 | SEQ ID NO: 8352 | 0.01% | 1.8 |
| 13 | 44 | SEQ ID NO: 8353 | 0.01% | 1.35 |
| 14 | 83 | SEQ ID NO: 8354 | 0.01% | 1.35 |
| 15 | 116 | SEQ ID NO: 8355 | 0.00% | 1.2 |
| 16 | 46 | SEQ ID NO: 8356 | 0.00% | 0.9 |
| 17 | 183 | SEQ ID NO: 8357 | 0.00% | 0.81 |
| 18 | 57 | SEQ ID NO: 8358 | 0.00% | 0.6 |
| 19 | 93 | SEQ ID NO: 8359 | 0.00% | 0.6 |
| 20 | 113 | SEQ ID NO: 8360 | 0.00% | 0.6 |

HLA A24 - 9 mers

| Maximum possible score using this molecule type | | | | 1596.672 |
|---|---|---|---|---|
| 1 | 198 | SEQ ID NO: 8361 | 13.15% | 210 |
| 2 | 105 | SEQ ID NO: 8362 | 9.39% | 150 |
| 3 | 210 | SEQ ID NO: 8363 | 4.69% | 75 |
| 4 | 75 | SEQ ID NO: 8364 | 3.15% | 50.4 |
| 5 | 85 | SEQ ID NO: 8365 | 2.63% | 42 |
| 6 | 205 | SEQ ID NO: 8366 | 2.10% | 33.6 |
| 7 | 77 | SEQ ID NO: 8367 | 1.87% | 30 |
| 8 | 158 | SEQ ID NO: 8368 | 0.65% | 10.5 |
| 9 | 103 | SEQ ID NO: 8369 | 0.56% | 9 |
| 10 | 227 | SEQ ID NO: 8370 | 0.55% | 8.8704 |
| 11 | 32 | SEQ ID NO: 8371 | 0.54% | 8.64 |
| 12 | 74 | SEQ ID NO: 8372 | 0.50% | 8 |
| 13 | 131 | SEQ ID NO: 8373 | 0.50% | 8 |
| 14 | 54 | SEQ ID NO: 8374 | 0.46% | 7.5 |
| 15 | 99 | SEQ ID NO: 8375 | 0.45% | 7.2 |
| 16 | 44 | SEQ ID NO: 8376 | 0.37% | 6 |
| 17 | 62 | SEQ ID NO: 8377 | 0.37% | 6 |
| 18 | 87 | SEQ ID NO: 8378 | 0.37% | 6 |
| 19 | 89 | SEQ ID NO: 8379 | 0.37% | 6 |
| 20 | 154 | SEQ ID NO: 8380 | 0.37% | 6 |

HLA A24 - 10 mers

| Maximum possible score using this molecule type | | | | 1596.672 |
|---|---|---|---|---|
| 1 | 105 | SEQ ID NO: 8381 | 22.54% | 360 |
| 2 | 204 | SEQ ID NO: 8382 | 17.53% | 280 |
| 3 | 209 | SEQ ID NO: 8383 | 3.13% | 50 |
| 4 | 75 | SEQ ID NO: 8384 | 1.87% | 30 |
| 5 | 85 | SEQ ID NO: 8385 | 1.87% | 30 |
| 6 | 77 | SEQ ID NO: 8386 | 1.12% | 18 |
| 7 | 74 | SEQ ID NO: 8387 | 0.84% | 13.44 |
| 8 | 210 | SEQ ID NO: 8388 | 0.56% | 9 |
| 9 | 226 | SEQ ID NO: 8389 | 0.55% | 8.8704 |
| 10 | 98 | SEQ ID NO: 8390 | 0.54% | 8.64 |
| 11 | 198 | SEQ ID NO: 8391 | 0.46% | 7.5 |
| 12 | 67 | SEQ ID NO: 8392 | 0.45% | 7.2 |
| 13 | 152 | SEQ ID NO: 8393 | 0.43% | 7 |
| 14 | 43 | SEQ ID NO: 8394 | 0.37% | 6 |
| 15 | 63 | SEQ ID NO: 8395 | 0.37% | 6 |
| 16 | 72 | SEQ ID NO: 8396 | 0.37% | 6 |
| 17 | 89 | SEQ ID NO: 8397 | 0.37% | 6 |
| 18 | 101 | SEQ ID NO: 8398 | 0.37% | 6 |
| 19 | 107 | SEQ ID NO: 8399 | 0.37% | 6 |
| 20 | 111 | SEQ ID NO: 8400 | 0.37% | 6 |

HLA A 0201 - 9 mers

| Maximum possible score using this molecule type | | | | 3925227.1 |
|---|---|---|---|---|
| 1 | 138 | SEQ ID NO: 8401 | 0.21% | 8532.082944 |
| 2 | 106 | SEQ ID NO: 8402 | 0.10% | 3977.8497792 |
| 3 | 44 | SEQ ID NO: 8403 | 0.03% | 1243.078056 |
| 4 | 71 | SEQ ID NO: 8404 | 0.00% | 348.872832 |
| 5 | 234 | SEQ ID NO: 8405 | 0.00% | 243.432 |
| 6 | 51 | SEQ ID NO: 8406 | 0.00% | 130.26096 |
| 7 | 109 | SEQ ID NO: 8407 | 0.00% | 91.182672 |
| 8 | 81 | SEQ ID NO: 8408 | 0.00% | 73.342584 |
| 9 | 88 | SEQ ID NO: 8409 | 0.00% | 70.386624 |
| 10 | 1 | SEQ ID NO: 8410 | 0.00% | 65.32728732 |
| 11 | 38 | SEQ ID NO: 8411 | 0.00% | 47.876409 |
| 12 | 76 | SEQ ID NO: 8412 | 0.00% | 36.8637882 |
| 13 | 46 | SEQ ID NO: 8413 | 0.00% | 30.889782 |
| 14 | 211 | SEQ ID NO: 8414 | 0.00% | 21.616753941 |
| 15 | 201 | SEQ ID NO: 8415 | 0.00% | 19.657134 |
| 16 | 102 | SEQ ID NO: 8416 | 0.00% | 18.4318941 |
| 17 | 199 | SEQ ID NO: 8417 | 0.00% | 16.496865 |
| 18 | 74 | SEQ ID NO: 8418 | 0.00% | 15.783256167 |
| 19 | 62 | SEQ ID NO: 8419 | 0.00% | 13.9968225 |
| 20 | 99 | SEQ ID NO: 8420 | 0.00% | 10.31851392 |

HLA A 0201 - 10 mers

| Maximum possible score using this molecule type | | | | 3925227.1 |
|---|---|---|---|---|
| 1 | 78 | SEQ ID NO: 8421 | 0.01% | 556.494246 |
| 2 | 138 | SEQ ID NO: 8422 | 0.01% | 395.245972224 |
| 3 | 84 | SEQ ID NO: 8423 | 0.00% | 201.554244 |
| 4 | 71 | SEQ ID NO: 8424 | 0.00% | 143.65707264 |
| 5 | 44 | SEQ ID NO: 8425 | 0.00% | 132.54624 |
| 6 | 76 | SEQ ID NO: 8426 | 0.00% | 84.78671286 |
| 7 | 8 | SEQ ID NO: 8427 | 0.00% | 69.552 |
| 8 | 211 | SEQ ID NO: 8428 | 0.00% | 52.7237901 |
| 9 | 113 | SEQ ID NO: 8429 | 0.00% | 47.99088 |
| 10 | 61 | SEQ ID NO: 8430 | 0.00% | 37.4509575 |
| 11 | 93 | SEQ ID No: 8431 | 0.00% | 31.24872 |
| 12 | 137 | SEQ ID NO: 8432 | 0.00% | 31.1384304 |
| 13 | 37 | SEQ ID NO: 8433 | 0.00% | 27.531 |
| 14 | 55 | SEQ ID NO: 8434 | 0.00% | 22.9153278 |
| 15 | 98 | SEQ ID NO: 8435 | 0.00% | 22.1063618985 |
| 16 | 108 | SEQ ID NO: 8436 | 0.00% | 21.55457052 |
| 17 | 63 | SEQ ID NO: 8437 | 0.00% | 21.3624 |
| 18 | 45 | SEQ ID NO: 8438 | 0.00% | 19.657134 |
| 19 | 200 | SEQ ID NO: 8439 | 0.00% | 19.657134 |
| 20 | 104 | SEQ ID NO: 8440 | 0.00% | 13.87622016 |

HLA A 1101 - 9 mers

| Maximum possible score using this molecule type | | | | 36 |
|---|---|---|---|---|
| 1 | 58 | SEQ ID NO: 8441 | 5.55% | 2 |
| 2 | 125 | SEQ ID NO: 8442 | 1.66% | 0.6 |
| 3 | 226 | SEQ ID NO: 8443 | 1.66% | 0.6 |
| 4 | 229 | SEQ ID NO: 8444 | 1.66% | 0.6 |

HLA A 1101 - 10 mers

| Maximum possible score using this molecule type | | | | 36 |
|---|---|---|---|---|
| 1 | 122 | SEQ ID NO: 8445 | 2.22% | 0.8 |
| 2 | 228 | SEQ ID NO: 8446 | 2.22% | 0.8 |

HLA B7 - 9 mers

| Maximum possible score using this molecule type | | | | 5400 |
|---|---|---|---|---|
| 1 | 97 | SEQ ID NO: 8447 | 0.66% | 36 |
| 2 | 86 | SEQ ID NO: 8448 | 0.37% | 20 |
| 3 | 37 | SEQ ID NO: 8449 | 0.33% | 18 |
| 4 | 62 | SEQ ID NO: 8450 | 0.33% | 18 |
| 5 | 32 | SEQ ID NO: 8451 | 0.22% | 12 |
| 6 | 102 | SEQ ID NO: 8452 | 0.22% | 12 |
| 7 | 227 | SEQ ID NO: 8453 | 0.22% | 12 |
| 8 | 53 | SEQ ID NO: 8454 | 0.11% | 6 |
| 9 | 1 | SEQ ID NO: 8455 | 0.07% | 4 |
| 10 | 44 | SEQ ID NO: 8456 | 0.07% | 4 |
| 11 | 56 | SEQ ID NO: 8457 | 0.07% | 4 |
| 12 | 64 | SEQ ID NO: 8458 | 0.07% | 4 |
| 13 | 74 | SEQ ID NO: 8459 | 0.07% | 4 |
| 14 | 76 | SEQ ID NO: 8460 | 0.07% | 4 |
| 15 | 87 | SEQ ID NO: 8461 | 0.07% | 4 |
| 16 | 106 | SEQ ID NO: 8462 | 0.07% | 4 |
| 17 | 131 | SEQ ID NO: 8463 | 0.07% | 4 |
| 18 | 23 | SEQ ID NO: 8464 | 0.03% | 2 |
| 19 | 157 | SEQ ID NO: 8465 | 0.03% | 2 |
| 20 | 166 | SEQ ID NO: 8466 | 0.03% | 2 |

HLA B7 - 10 mers

| Maximum possible score using this molecule type | | | | 5400 |
|---|---|---|---|---|
| 1 | 119 | SEQ ID NO: 8467 | 3.33% | 180 |
| 2 | 264 | SEQ ID NO: 8468 | 1.48% | 80 |
| 3 | 98 | SEQ ID NO: 8469 | 0.66% | 36 |
| 4 | 27 | SEQ ID NO: 8470 | 0.37% | 20 |
| 5 | 86 | SEQ ID NO: 8471 | 0.37% | 20 |
| 6 | 31 | SEQ ID NO: 8472 | 0.22% | 12 |
| 7 | 63 | SEQ ID NO: 8473 | 0.22% | 12 |
| 8 | 96 | SEQ ID NO: 8474 | 0.22% | 12 |
| 9 | 101 | SEQ ID NO: 8475 | 0.22% | 12 |
| 10 | 226 | SEQ ID NO: 8476 | 0.22% | 12 |
| 11 | 157 | SEQ ID NO: 8477 | 0.14% | 8 |
| 12 | 176 | SEQ ID NO: 8478 | 0.14% | 8 |
| 13 | 238 | SEQ ID NO: 8479 | 0.14% | 8 |
| 14 | 36 | SEQ ID NO: 8480 | 0.11% | 6 |
| 15 | 53 | SEQ ID NO: 8481 | 0.11% | 6 |
| 16 | 61 | SEQ ID NO: 8482 | 0.11% | 6 |
| 17 | 3 | SEQ ID NO: 8483 | 0.07% | 4 |
| 18 | 40 | SEQ ID NO: 8484 | 0.07% | 4 |
| 19 | 55 | SEQ ID NO: 8485 | 0.07% | 4 |
| 20 | 74 | SEQ ID NO: 8486 | 0.07% | 4 |

[1678] TABLE 18
Epitopes for SEQ ID NO: 6044

| | | | | |
|---|---|---|---|---|
| | Start | | % of max. | |
| Rank | position | Sequence | score | Score |

HLA A1 - 9 mers

| Maximum possible score using this molecule type | | | | 5625 |
|---|---|---|---|---|
| 1 | 69 | SEQ ID NO: 8487 | 0.04% | 2.5 |
| 2 | 89 | SEQ ID NO: 8488 | 0.02% | 1.5 |
| 3 | 141 | SEQ ID NO: 8489 | 0.01% | 1 |
| 4 | 113 | SEQ ID NO: 8490 | 0.00% | 0.5 |

HLA A1 - 10 mers

| Maximum possible score using this molecule type | | | | 5625 |
|---|---|---|---|---|
| 1 | 21 | SEQ ID NO: 8491 | 0.02% | 1.5 |
| 2 | 88 | SEQ ID NO: 8492 | 0.02% | 1.5 |
| 3 | 8 | SEQ ID NO: 8493 | 0.02% | 1.25 |
| 4 | 31 | SEQ ID NO: 8494 | 0.00% | 0.5 |
| 5 | 112 | SEQ ID NO: 8495 | 0.00% | 0.5 |

HLA A3 - 9 mers

| Maximum possible score using this molecule type | | | | 12150 |
|---|---|---|---|---|
| 1 | 60 | SEQ ID NO: 8496 | 1.23% | 150 |
| 2 | 77 | SEQ ID NO: 8497 | 1.11% | 135 |
| 3 | 141 | SEQ ID NO: 8498 | 0.49% | 60 |
| 4 | 95 | SEQ ID NO: 8499 | 0.32% | 40 |
| 5 | 128 | SEQ ID NO: 8500 | 0.08% | 10 |
| 6 | 113 | SEQ ID NO: 8501 | 0.04% | 6 |
| 7 | 69 | SEQ ID NO: 8502 | 0.01% | 2 |
| 8 | 22 | SEQ ID NO: 8503 | 0.01% | 1.8 |
| 9 | 42 | SEQ ID NO: 8504 | 0.01% | 1.8 |
| 10 | 78 | SEQ ID NO: 8505 | 0.00% | 1.2 |
| 11 | 32 | SEQ ID NO: 8506 | 0.00% | 1 |
| 12 | 54 | SEQ ID NO: 8507 | 0.00% | 0.9 |
| 13 | 74 | SEQ ID NO: 8508 | 0.00% | 0.9 |
| 14 | 28 | SEQ ID NO: 8509 | 0.00% | 0.6 |
| 15 | 36 | SEQ ID NO: 8510 | 0.00% | 0.6 |
| 16 | 48 | SEQ ID NO: 8511 | 0.00% | 0.6 |
| 17 | 118 | SEQ ID NO: 8512 | 0.00% | 0.6 |
| 18 | 4 | SEQ ID NO: 8513 | 0.00% | 0.5 |

HLA A3 - 10 mers

| Maximum possible score using this molecule type | | | | 12150 |
|---|---|---|---|---|
| 1 | 94 | SEQ ID NO: 8514 | 0.49% | 60 |
| 2 | 48 | SEQ ID NO: 8515 | 0.16% | 20 |
| 3 | 128 | SEQ ID NO: 8516 | 0.16% | 20 |
| 4 | 60 | SEQ ID NO: 8517 | 0.12% | 15 |
| 5 | 127 | SEQ ID NO: 8518 | 0.12% | 15 |
| 6 | 25 | SEQ ID NO: 8519 | 0.04% | 6 |
| 7 | 95 | SEQ ID NO: 8520 | 0.04% | 6 |
| 8 | 141 | SEQ ID NO: 8521 | 0.04% | 6 |
| 9 | 41 | SEQ ID NO: 8522 | 0.04% | 5.4 |
| 10 | 77 | SEQ ID NO: 8523 | 0.04% | 5.4 |
| 11 | 116 | SEQ ID NO: 8524 | 0.04% | 5.4 |
| 12 | 91 | SEQ ID NO: 8525 | 0.03% | 4 |
| 13 | 4 | SEQ ID NO: 8526 | 0.01% | 2 |
| 14 | 112 | SEQ ID NO: 8527 | 0.01% | 1.8 |
| 15 | 113 | SEQ ID NO: 8528 | 0.01% | 1.35 |
| 16 | 12 | SEQ ID NO: 8529 | 0.00% | 1.2 |
| 17 | 31 | SEQ ID NO: 8530 | 0.00% | 1 |
| 18 | 32 | SEQ ID NO: 8531 | 0.00% | 1 |
| 19 | 15 | SEQ ID NO: 8532 | 0.00% | 0.9 |
| 20 | 27 | SEQ ID NO: 8533 | 0.00% | 0.9 |

HLA A24 - 9 mers

| Maximum possible score using this molecule type | | | | 1596.672 |
|---|---|---|---|---|
| 1 | 61 | SEQ ID NO: 8534 | 14.46% | 231 |
| 2 | 16 | SEQ ID NO: 8535 | 3.13% | 50 |
| 3 | 120 | SEQ ID NO: 8536 | 1.87% | 30 |
| 4 | 41 | SEQ ID NO: 8537 | 0.60% | 9.6 |
| 5 | 71 | SEQ ID NO: 8538 | 0.45% | 7.2 |
| 6 | 21 | SEQ ID NO: 8539 | 0.37% | 6 |
| 7 | 53 | SEQ ID NO: 8540 | 0.37% | 6 |
| 8 | 65 | SEQ ID NO: 8541 | 0.37% | 6 |
| 9 | 121 | SEQ ID NO: 8542 | 0.37% | 6 |
| 10 | 74 | SEQ ID NO: 8543 | 0.36% | 5.76 |
| 11 | 20 | SEQ ID NO: 8544 | 0.35% | 5.6 |
| 12 | 79 | SEQ ID NO: 8545 | 0.35% | 5.6 |
| 13 | 105 | SEQ ID NO: 8546 | 0.33% | 5.28 |
| 14 | 48 | SEQ ID NO: 8547 | 0.30% | 4.8 |
| 15 | 88 | SEQ ID NO: 8548 | 0.30% | 4.8 |
| 16 | 106 | SEQ ID NO: 8549 | 0.30% | 4.8 |
| 17 | 37 | SEQ ID NO: 8550 | 0.27% | 4.4 |
| 18 | 70 | SEQ ID NO: 8551 | 0.27% | 4.4 |
| 19 | 18 | SEQ ID NO: 8552 | 0.25% | 4 |
| 20 | 57 | SEQ ID NO: 8553 | 0.22% | 3.6 |

HLA A24 - 10 mers

| Maximum possible score using this molecule type | | | | 1596.672 |
|---|---|---|---|---|
| 1 | 120 | SEQ ID NO: 8554 | 1.87% | 30 |
| 2 | 73 | SEQ ID NO: 8555 | 0.54% | 8.64 |
| 3 | 19 | SEQ ID NO: 8556 | 0.52% | 8.4 |
| 4 | 78 | SEQ ID NO: 8557 | 0.52% | 8.4 |
| 5 | 104 | SEQ ID NO: 8558 | 0.49% | 7.92 |
| 6 | 61 | SEQ ID NO: 8559 | 0.46% | 7.5 |
| 7 | 47 | SEQ ID NO: 8560 | 0.45% | 7.2 |
| 8 | 36 | SEQ ID NO: 8561 | 0.41% | 6.6 |
| 9 | 52 | SEQ ID NO: 8562 | 0.37% | 6 |
| 10 | 64 | SEQ ID NO: 8563 | 0.30% | 4.8 |
| 11 | 70 | SEQ ID NO: 8564 | 0.30% | 4.8 |
| 12 | 105 | SEQ ID NO: 8565 | 0.30% | 4.8 |
| 13 | 123 | SEQ ID NO: 8566 | 0.30% | 4.8 |
| 14 | 69 | SEQ ID NO: 8567 | 0.27% | 4.4 |
| 15 | 20 | SEQ ID NO: 8568 | 0.25% | 4 |
| 16 | 66 | SEQ ID NO: 8569 | 0.25% | 4 |
| 17 | 83 | SEQ ID NO: 8570 | 0.25% | 4 |
| 18 | 86 | SEQ ID NO: 8571 | 0.25% | 4 |
| 19 | 101 | SEQ ID NO: 8572 | 0.25% | 4 |
| 20 | 119 | SEQ ID NO: 8573 | 0.25% | 4 |

HLA A 0201 - 9 mers

| Maximum possible score using this molecule type | | | | 3925227.1 |
|---|---|---|---|---|
| 1 | 62 | SEQ ID NO: 8574 | 0.00% | 136.1646 |
| 2 | 85 | SEQ ID NO: 8575 | 0.00% | 69.6969 |
| 3 | 47 | SEQ ID NO: 8576 | 0.00% | 60.153786 |
| 4 | 121 | SEQ ID NO: 8577 | 0.00% | 52.5182736 |
| 5 | 74 | SEQ ID NO: 8578 | 0.00% | 49.13352 |
| 6 | 23 | SEQ ID NO: 8579 | 0.00% | 21.99582 |
| 7 | 78 | SEQ ID NO: 8580 | 0.00% | 19.42488 |
| 8 | 114 | SEQ ID NO: 8581 | 0.00% | 14.6900655 |
| 9 | 4 | SEQ ID NO: 8582 | 0.00% | 11.304684 |
| 10 | 79 | SEQ ID NO: 8583 | 0.00% | 8.4687081 |
| 11 | 122 | SEQ ID NO: 8584 | 0.00% | 6.0996 |
| 12 | 100 | SEQ ID NO: 8585 | 0.00% | 5.382 |
| 13 | 105 | SEQ ID NO: 8586 | 0.00% | 4.981593 |
| 14 | 25 | SEQ ID NO: 8587 | 0.00% | 4.968 |
| 15 | 115 | SEQ ID NO: 8588 | 0.00% | 4.966482 |
| 16 | 24 | SEQ ID NO: 8589 | 0.00% | 4.4815221585 |
| 17 | 111 | SEQ ID NO: 8590 | 0.00% | 4.128201 |
| 18 | 94 | SEQ ID NO: 8591 | 0.00% | 3.67632 |
| 19 | 34 | SEQ ID NO: 8592 | 0.00% | 3.47553 |
| 20 | 12 | SEQ ID NO: 8593 | 0.00% | 3.30993 |

HLA A 0201 - 10 mers

| Maximum possible score using this molecule type | | | | 3925227.1 |
|---|---|---|---|---|
| 1 | 77 | SEQ ID NO: 8594 | 0.00% | 147.97188 |
| 2 | 62 | SEQ ID NO: 8595 | 0.00% | 143.59176 |
| 3 | 113 | SEQ ID NO: 8596 | 0.00% | 106.83684 |
| 4 | 78 | SEQ ID NO: 8597 | 0.00% | 83.526984 |
| 5 | 86 | SEQ ID NO: 8598 | 0.00% | 83.526984 |
| 6 | 74 | SEQ ID NO: 8599 | 0.00% | 69.552 |
| 7 | 121 | SEQ ID NO: 8600 | 0.00% | 61.06776 |
| 8 | 12 | SEQ ID NO: 8601 | 0.00% | 50.232 |
| 9 | 44 | SEQ ID NO: 8602 | 0.00% | 26.082 |
| 10 | 4 | SEQ ID NO: 8603 | 0.00% | 18.3816 |
| 11 | 0 | SEQ ID NO: 8604 | 0.00% | 17.38386 |
| 12 | 72 | SEQ ID NO: 8605 | 0.00% | 17.1396 |
| 13 | 22 | SEQ ID NO: 8606 | 0.00% | 16.21914 |
| 14 | 122 | SEQ ID NO: 8607 | 0.00% | 14.02908 |
| 15 | 64 | SEQ ID NO: 8608 | 0.00% | 11.161854 |
| 16 | 46 | SEQ ID NO: 8609 | 0.00% | 10.34586 |
| 17 | 54 | SEQ ID NO: 8610 | 0.00% | 8.846145 |
| 18 | 47 | SEQ ID NO: 8611 | 0.00% | 7.575080337 |
| 19 | 131 | SEQ ID NO: 8612 | 0.00% | 7.452 |
| 20 | 114 | SEQ ID NO: 8613 | 0.00% | 6.735366 |

HLA A 1101 - 9 mers

| Maximum possible score using this molecule type | | | | 36 |
|---|---|---|---|---|
| 1 | 69 | SEQ ID NO: 8614 | 5.55% | 2 |
| 2 | 22 | SEQ ID NO: 8615 | 5% | 1.8 |
| 3 | 77 | SEQ ID NO: 8616 | 5% | 1.8 |
| 4 | 141 | SEQ ID NO: 8617 | 3.33% | 1.2 |
| 5 | 60 | SEQ ID NO: 8618 | 2.22% | 0.8 |
| 6 | 95 | SEQ ID NO: 8619 | 2.22% | 0.8 |
| 7 | 36 | SEQ ID NO: 8620 | 1.66% | 0.6 |

HLA A 1101 - 10 mers

| Maximum possible score using this molecule type | | | | 36 |
|---|---|---|---|---|
| 1 | 41 | SEQ ID NO: 8621 | 3.33% | 1.2 |
| 2 | 68 | SEQ ID NO: 8622 | 33.33% | 1.2 |
| 3 | 94 | SEQ ID NO: 8623 | 3.33% | 1.2 |
| 4 | 31 | SEQ ID NO: 8624 | 2.77% | 1 |
| 5 | 127 | SEQ ID NO: 8625 | 2.5% | 0.9 |

HLA B7 - 9 mers

| Maximum possible score using this molecule type | | | | 5400 |
|---|---|---|---|---|
| 1 | 48 | SEQ ID NO: 8626 | 0.74% | 40 |
| 2 | 20 | SEQ ID NO: 8627 | 0.37% | 20 |
| 3 | 121 | SEQ ID NO: 8628 | 0.33% | 18 |
| 4 | 18 | SEQ ID NO: 8629 | 0.07% | 4 |
| 5 | 21 | SEQ ID NO: 8630 | 0.07% | 4 |
| 6 | 37 | SEQ ID NO: 8631 | 0.07% | 4 |
| 7 | 41 | SEQ ID NO: 8632 | 0.07% | 4 |
| 8 | 53 | SEQ ID NO: 8633 | 0.07% | 4 |
| 9 | 65 | SEQ ID NO: 8634 | 0.07% | 4 |
| 10 | 70 | SEQ ID NO: 8635 | 0.07% | 4 |
| 11 | 71 | SEQ ID NO: 8636 | 0.07% | 4 |
| 12 | 74 | SEQ ID NO: 8637 | 0.07% | 4 |
| 13 | 79 | SEQ ID NO: 8638 | 0.07% | 4 |
| 14 | 88 | SEQ ID NO: 8639 | 0.07% | 4 |
| 15 | 105 | SEQ ID NO: 8640 | 0.07% | 4 |
| 16 | 106 | SEQ ID NO: 8641 | 0.07% | 4 |
| 17 | 124 | SEQ ID NO: 8642 | 0.07% | 4 |
| 18 | 1 | SEQ ID NO: 8643 | 0.03% | 2 |
| 19 | 120 | SEQ ID NO: 8644 | 0.03% | 1.8 |
| 20 | 11 | SEQ ID NO: 8645 | 0.02% | 1.2 |

HLA B7 - 10 mers

| Maximum possible score using this molecule type | | | | 5400 |
|---|---|---|---|---|
| 1 | 63 | SEQ ID NO: 8646 | 1.48% | 80 |
| 2 | 123 | SEQ ID NO: 8647 | 0.74% | 40 |
| 3 | 20 | SEQ ID NO: 8648 | 0.37% | 20 |
| 4 | 64 | SEQ ID NO: 8649 | 0.22% | 12 |
| 5 | 119 | SEQ ID NO: 8650 | 0.11% | 6 |
| 6 | 54 | SEQ ID NO: 8651 | 0.09% | 5 |
| 7 | 19 | SEQ ID NO: 8652 | 0.07% | 4 |
| 8 | 36 | SEQ ID NO: 8653 | 0.07% | 4 |
| 9 | 47 | SEQ ID NO: 8654 | 0.07% | 4 |
| 10 | 52 | SEQ ID NO: 8655 | 0.07% | 4 |
| 11 | 69 | SEQ ID NO: 8656 | 0.07% | 4 |
| 12 | 70 | SEQ ID NO: 8657 | 0.07% | 4 |
| 13 | 73 | SEQ ID NO: 8658 | 0.07% | 4 |
| 14 | 78 | SEQ ID NO: 8659 | 0.07% | 4 |
| 15 | 83 | SEQ ID NO: 8660 | 0.07% | 4 |
| 16 | 86 | SEQ ID NO: 8661 | 0.07% | 4 |
| 17 | 101 | SEQ ID NO: 8662 | 0.07% | 4 |
| 18 | 104 | SEQ ID NO: 8663 | 0.07% | 4 |
| 19 | 105 | SEQ ID NO: 8664 | 0.07% | 4 |
| 20 | 15 | SEQ ID NO: 8665 | 0.03% | 2 |

[1679] TABLE 19
Epitopes for SEQ ID NO: 6045

| | | | | |
|---|---|---|---|---|
| | Start | | % of max. | |
| Rank | position | Sequence | score | Score |

HLA A1 - 9 mers

| Maximum possible score using this molecule type | | | | 5625 |
|---|---|---|---|---|
| 1 | 4 | SEQ ID NO: 8666 | 0.02% | 1.35 |
| 2 | 66 | SEQ ID NO: 8667 | 0.02% | 1.35 |
| 3 | 33 | SEQ ID NO: 8668 | 0.02% | 1.25 |
| 4 | 44 | SEQ ID NO: 8669 | 0.01% | 1 |
| 5 | 50 | SEQ ID NO: 8670 | 0.01% | 1 |
| 6 | 14 | SEQ ID NO: 8671 | 0.01% | 0.75 |
| 7 | 48 | SEQ ID NO: 8672 | 0.01% | 0.75 |
| 8 | 11 | SEQ ID NO: 8673 | 0.00% | 0.5 |

HLA A1 - 10 mers

| Maximum possible score using this molecule type | | | | 5625 |
|---|---|---|---|---|
| 1 | 4 | SEQ ID NO: 8674 | 0.12% | 6.75 |
| 2 | 66 | SEQ ID NO: 8675 | 0.12% | 6.75 |
| 3 | 10 | SEQ ID NO: 8676 | 0.00% | 0.5 |
| 4 | 28 | SEQ ID NO: 8677 | 0.00% | 0.5 |
| 5 | 32 | SEQ ID NO: 8678 | 0.00% | 0.5 |
| 6 | 47 | SEQ ID NO: 8679 | 0.00% | 0.5 |

HLA A3 - 9 mers

| Maximum possible score using this molecule type | | | | 12150 |
|---|---|---|---|---|
| 1 | 17 | SEQ ID NO: 8680 | 0.24% | 30 |
| 2 | 44 | SEQ ID NO: 8681 | 0.07% | 9 |
| 3 | 19 | SEQ ID NO: 8682 | 0.06% | 8.1 |
| 4 | 50 | SEQ ID NO: 8683 | 0.04% | 5.4 |
| 5 | 29 | SEQ ID NO: 8684 | 0.03% | 4 |
| 6 | 52 | SEQ ID NO: 8685 | 0.02% | 3.24 |
| 7 | 54 | SEQ ID NO: 8686 | 0.02% | 3 |
| 8 | 11 | SEQ ID NO: 8687 | 0.01% | 1.8 |
| 9 | 37 | SEQ ID NO: 8688 | 0.01% | 1.8 |
| 10 | 25 | SEQ ID NO: 8689 | 0.01% | 1.35 |
| 11 | 10 | SEQ ID NO: 8690 | 0.00% | 0.9 |
| 12 | 16 | SEQ ID NO: 8691 | 0.00% | 0.9 |
| 13 | 35 | SEQ ID NO: 8692 | 0.00% | 0.6 |

HLA A3 - 10 mers

| Maximum possible score using this molecule type | | | | 12150 |
|---|---|---|---|---|
| 1 | 49 | SEQ ID NO: 8693 | 0.44% | 54 |
| 2 | 17 | SEQ ID NO: 8694 | 0.22% | 27 |
| 3 | 10 | SEQ ID NO: 8695 | 0.14% | 18 |
| 4 | 16 | SEQ ID NO: 8696 | 0.07% | 9 |
| 5 | 32 | SEQ ID NO: 8697 | 0.04% | 6 |
| 6 | 19 | SEQ ID NO: 8698 | 0.01% | 1.8 |
| 7 | 29 | SEQ ID NO: 8699 | 0.00% | 1.2 |
| 8 | 23 | SEQ ID NO: 8700 | 0.00% | 0.9 |
| 9 | 26 | SEQ ID NO: 8701 | 0.00% | 0.9 |

HLA A24 - 9 mers

| Maximum possible score using this molecule type | | | | 1596.672 |
|---|---|---|---|---|
| 1 | 18 | SEQ ID NO: 8702 | 1.87% | 30 |
| 2 | 24 | SEQ ID NO: 8703 | 0.65% | 10.5 |
| 3 | 9 | SEQ ID NO: 8704 | 0.52% | 8.4 |
| 4 | 12 | SEQ ID NO: 8705 | 0.52% | 8.4 |
| 5 | 28 | SEQ ID NO: 8706 | 0.52% | 8.4 |
| 6 | 42 | SEQ ID NO: 8707 | 0.52% | 8.4 |
| 7 | 57 | SEQ ID NO: 8708 | 0.52% | 8.4 |
| 8 | 66 | SEQ ID NO: 8709 | 0.52% | 8.4 |
| 9 | 55 | SEQ ID NO: 8710 | 0.51% | 8.25 |
| 10 | 0 | SEQ ID NO: 8711 | 0.48% | 7.7 |
| 11 | 22 | SEQ ID NO: 8712 | 0.45% | 7.2 |
| 12 | 10 | SEQ ID NO: 8713 | 0.37% | 6 |
| 13 | 25 | SEQ ID NO: 8714 | 0.37% | 6 |
| 14 | 30 | SEQ ID NO: 8715 | 0.37% | 6 |
| 15 | 19 | SEQ ID NO: 8716 | 0.35% | 5.6 |
| 16 | 40 | SEQ ID NO: 8717 | 0.31% | 5 |
| 17 | 3 | SEQ ID NO: 8718 | 0.30% | 4.8 |
| 18 | 65 | SEQ ID NO: 8719 | 0.30% | 4.8 |
| 19 | 14 | SEQ ID NO: 8720 | 0.27% | 4.32 |
| 20 | 56 | SEQ ID NO: 8721 | 0.25% | 4 |

HLA A24 - 10 mers

| Maximum possible score using this molecule type | | | | 1596.672 |
|---|---|---|---|---|
| 1 | 55 | SEQ ID NO: 8722 | 18.78% | 300 |
| 2 | 18 | SEQ ID NO: 8723 | 2.63% | 42 |
| 3 | 21 | SEQ ID NO: 8724 | 2.25% | 36 |
| 4 | 2 | SEQ ID NO: 8725 | 1.87% | 30 |
| 5 | 24 | SEQ ID NO: 8726 | 1.87% | 30 |
| 6 | 11 | SEQ ID NO: 8727 | 0.52% | 8.4 |
| 7 | 40 | SEQ ID NO: 8728 | 0.52% | 8.4 |
| 8 | 65 | SEQ ID NO: 8729 | 0.42% | 6.72 |
| 9 | 9 | SEQ ID NO: 8730 | 0.37% | 6 |
| 10 | 8 | SEQ ID NO: 8731 | 0.35% | 5.6 |
| 11 | 27 | SEQ ID NO: 8732 | 0.35% | 5.6 |
| 12 | 41 | SEQ ID NO: 8733 | 0.35% | 5.6 |
| 13 | 57 | SEQ ID NO: 8734 | 0.31% | 5 |
| 14 | 17 | SEQ ID NO: 8735 | 0.25% | 4 |
| 15 | 29 | SEQ ID NO: 8736 | 0.25% | 4 |
| 16 | 64 | SEQ ID NO: 8737 | 0.25% | 4 |
| 17 | 16 | SEQ ID NO: 8738 | 0.22% | 3.6 |
| 18 | 10 | SEQ ID NO: 8739 | 0.18% | 3 |
| 19 | 13 | SEQ ID NO: 8740 | 0.18% | 2.88 |
| 20 | 23 | SEQ ID NO: 8741 | 0.08% | 1.4 |

HLA A 0201 - 9 mers

| Maximum possible score using this molecule type | | | | 3925227.1 |
|---|---|---|---|---|
| 1 | 19 | SEQ ID NO: 8742 | 0.03% | 1310.8823136 |
| 2 | 15 | SEQ ID NO: 8743 | 0.02% | 1082.4143022 |
| 3 | 16 | SEQ ID NO: 8744 | 0.02% | 1040.33238624 |
| 4 | 49 | SEQ ID NO: 8745 | 0.00% | 382.536 |
| 5 | 25 | SEQ ID NO: 8746 | 0.00% | 342.863529264 |
| 6 | 56 | SEQ ID NO: 8747 | 0.00% | 63.28397376 |
| 7 | 12 | SEQ ID NO: 8748 | 0.00% | 40.19736105 |
| 8 | 10 | SEQ ID NO: 8749 | 0.00% | 21.3624 |
| 9 | 22 | SEQ ID NO: 8750 | 0.00% | 19.7762418 |
| 10 | 26 | SEQ ID NO: 8751 | 0.00% | 12.6684 |
| 11 | 20 | SEQ ID NO: 8752 | 0.00% | 11.544666 |
| 12 | 37 | SEQ ID NO: 8753 | 0.00% | 10.4328 |
| 13 | 32 | SEQ ID NO: 8754 | 0.00% | 8.4456 |
| 14 | 23 | SEQ ID NO: 8755 | 0.00% | 6.2888049 |
| 15 | 47 | SEQ ID NO: 8756 | 0.00% | 6.0858 |
| 16 | 3 | SEQ ID NO: 8757 | 0.00% | 4.582929078 |
| 17 | 18 | SEQ ID NO: 8758 | 0.00% | 4.4855150505 |
| 18 | 28 | SEQ ID NO: 8759 | 0.00% | 4.2923589 |
| 19 | 62 | SEQ ID NO: 8760 | 0.00% | 2.88098391 |
| 20 | 27 | SEQ ID NO: 8761 | 0.00% | 1.699677 |

HLA A 0201 - 10 mers

| Maximum possible score using this molecule type | | | | 3925227.1 |
|---|---|---|---|---|
| 1 | 17 | SEQ ID NO: 8762 | 0.16% | 6459.14167272 |
| 2 | 19 | SEQ ID NO: 8763 | 0.01% | 607.88448 |
| 3 | 25 | SEQ ID NO: 8764 | 0.00% | 126.83304 |
| 4 | 11 | SEQ ID NO: 8765 | 0.00% | 63.16728165 |
| 5 | 15 | SEQ ID NO: 8766 | 0.00% | 53.54651988 |
| 6 | 37 | SEQ ID NO: 8767 | 0.00% | 28.51632 |
| 7 | 14 | SEQ ID NO: 8768 | 0.00% | 21.8247414 |
| 8 | 29 | SEQ ID NO: 8769 | 0.00% | 21.3624 |
| 9 | 26 | SEQ ID NO: 8770 | 0.00% | 19.42488 |
| 10 | 3 | SEQ ID NO: 8771 | 0.00% | 17.2167282 |
| 11 | 48 | SEQ ID NO: 8772 | 0.00% | 15.7068219 |
| 12 | 12 | SEQ ID NO: 8773 | 0.00% | 9.8581266 |
| 13 | 27 | SEQ ID NO: 8774 | 0.00% | 7.3086111 |
| 14 | 39 | SEQ ID NO: 8775 | 0.00% | 7.10976 |
| 15 | 23 | SEQ ID NO: 8776 | 0.00% | 5.7419523 |
| 16 | 22 | SEQ ID NO: 8777 | 0.00% | 4.599126 |
| 17 | 45 | SEQ ID NO: 8778 | 0.00% | 2.5495155 |
| 18 | 31 | SEQ ID NO: 8779 | 0.00% | 2.52747 |
| 19 | 52 | SEQ ID NO: 8780 | 0.00% | 2.383605 |
| 20 | 20 | SEQ ID NO: 8781 | 0.00% | 2.332847151 |

HLA A 1101 - 9 mers

| Maximum possible score using this molecule type | | | | 36 |
|---|---|---|---|---|
| 1 | 44 | SEQ ID NO: 8782 | 3.33% | 1.2 |

HLA B7 - 9 mers

| | |
|---|---|
| Maximum possible score using this molecule type | 5400 |

HLA B7 - 9 mers

| Maximum possible score using this molecule type | | | | 5400 |
|---|---|---|---|---|
| 1 | 3 | SEQ ID NO: 8783 | 0.37% | 20 |
| 2 | 12 | SEQ ID NO: 8784 | 0.37% | 20 |
| 3 | 22 | SEQ ID NO: 8785 | 0.37% | 20 |
| 4 | 56 | SEQ ID NO: 8786 | 0.37% | 20 |
| 5 | 30 | SEQ ID NO: 8787 | 0.22% | 12 |
| 6 | 9 | SEQ ID NO: 8788 | 0.07% | 4 |
| 7 | 10 | SEQ ID NO: 8789 | 0.07% | 4 |
| 8 | 19 | SEQ ID NO: 8790 | 0.07% | 4 |
| 9 | 25 | SEQ ID NO: 8791 | 0.07% | 4 |
| 10 | 28 | SEQ ID NO: 8792 | 0.07% | 4 |
| 11 | 42 | SEQ ID NO: 8793 | 0.07% | 4 |
| 12 | 65 | SEQ ID NO: 8794 | 0.07% | 4 |
| 13 | 35 | SEQ ID NO: 8795 | 0.05% | 3 |
| 14 | 66 | SEQ ID NO: 8796 | 0.02% | 1.2 |
| 15 | 15 | SEQ ID NO: 8797 | 0.01% | 1 |
| 16 | 47 | SEQ ID NO: 8798 | 0.01% | 1 |
| 17 | 20 | SEQ ID NO: 8799 | 0.01% | 0.6 |
| 18 | 23 | SEQ ID NO: 8800 | 0.00% | 0.5 |
| 19 | 27 | SEQ ID NO: 8801 | 0.00% | 0.5 |

HLA B7 - 10 mers

| Maximum possible score using this molecule type | | | | 5400 |
|---|---|---|---|---|
| 1 | 27 | SEQ ID NO: 8802 | 0.37% | 20 |
| 2 | 8 | SEQ ID NO: 8803 | 0.07% | 4 |
| 3 | 9 | SEQ ID NO: 8804 | 0.07% | 4 |
| 4 | 11 | SEQ ID NO: 8805 | 0.07% | 4 |
| 5 | 17 | SEQ ID NO: 8806 | 0.07% | 4 |
| 6 | 29 | SEQ ID NO: 8807 | 0.07% | 4 |
| 7 | 41 | SEQ ID NO: 8808 | 0.07% | 4 |
| 8 | 52 | SEQ ID NO: 8809 | 0.07% | 4 |
| 9 | 64 | SEQ ID NO: 8810 | 0.07% | 4 |
| 10 | 65 | SEQ ID NO: 8811 | 0.07% | 4 |
| 11 | 3 | SEQ ID NO: 8812 | 0.03% | 2 |
| 12 | 23 | SEQ ID NO: 8813 | 0.03% | 2 |
| 13 | 21 | SEQ ID NO: 8814 | 0.02% | 1.2 |
| 14 | 15 | SEQ ID NO: 8815 | 0.01% | 1 |
| 15 | 35 | SEQ ID NO: 8816 | 0.01% | 0.6 |
| 16 | 39 | SEQ ID NO: 8817 | 0.01% | 0.6 |
| 17 | 12 | SEQ ID NO: 8818 | 0.00% | 0.5 |
| 18 | 22 | SEQ ID NO: 8819 | 0.00% | 0.5 |
| 19 | 45 | SEQ ID NO: 8820 | 0.00% | 0.5 |

[1680] TABLE 20
Epitopes for SEQ ID NO: 6046

| | | | | |
|---|---|---|---|---|
| | Start | | % of max. | |
| Rank | position | Sequence | score | Score |

HLA A1 - 9 mers

| Maximum possible score using this molecule type | | | | 5625 |
|---|---|---|---|---|
| 1 | 186 | SEQ ID NO: 8821 | 2.22% | 125 |
| 2 | 156 | SEQ ID NO: 8822 | 0.88% | 50 |
| 3 | 14 | SEQ ID NO: 8823 | 0.08% | 4.5 |
| 4 | 0 | SEQ ID NO: 8824 | 0.04% | 2.5 |
| 5 | 29 | SEQ ID NO: 8825 | 0.04% | 2.5 |
| 6 | 85 | SEQ ID NO: 8826 | 0.04% | 2.5 |
| 7 | 168 | SEQ ID NO: 8827 | 0.04% | 2.5 |
| 8 | 133 | SEQ ID NO: 8828 | 0.02% | 1.35 |
| 9 | 111 | SEQ ID NO: 8829 | 0.02% | 1.125 |
| 10 | 61 | SEQ ID NO: 8830 | 0.01% | 1 |
| 11 | 7 | SEQ ID NO: 8831 | 0.01% | 0.9 |
| 12 | 131 | SEQ ID NO: 8832 | 0.01% | 0.9 |
| 13 | 211 | SEQ ID NO: 8833 | 0.01% | 0.625 |
| 14 | 4 | SEQ ID NO: 8834 | 0.00% | 0.5 |
| 15 | 43 | SEQ ID NO: 8835 | 0.00% | 0.5 |
| 16 | 95 | SEQ ID NO: 8836 | 0.00% | 0.5 |
| 17 | 136 | SEQ ID NO: 8837 | 0.00% | 0.5 |

HLA A1 - 10 mers

| Maximum possible score using this molecule type | | | | 5625 |
|---|---|---|---|---|
| 1 | 133 | SEQ ID NO: 8838 | 0.04% | 2.7 |
| 2 | 84 | SEQ ID NO: 8839 | 0.04% | 2.5 |
| 3 | 167 | SEQ ID NO: 8840 | 0.04% | 2.5 |
| 4 | 186 | SEQ ID NO: 8841 | 0.04% | 2.5 |
| 5 | 131 | SEQ ID NO: 8842 | 0.04% | 2.25 |
| 6 | 14 | SEQ ID NO: 8843 | 0.03% | 1.8 |
| 7 | 205 | SEQ ID NO: 8844 | 0.02% | 1.25 |
| 8 | 111 | SEQ ID NO: 8845 | 0.02% | 1.125 |
| 9 | 60 | SEQ ID NO: 8846 | 0.01% | 1 |
| 10 | 188 | SEQ ID NO: 8847 | 0.01% | 0.75 |
| 11 | 211 | SEQ ID NO: 8848 | 0.01% | 0.625 |
| 12 | 26 | SEQ ID NO: 8849 | 0.00% | 0.5 |
| 13 | 94 | SEQ ID NO: 8850 | 0.00% | 0.5 |
| 14 | 135 | SEQ ID NO: 8851 | 0.00% | 0.5 |
| 15 | 168 | SEQ ID NO: 8852 | 0.00% | 0.5 |

HLA A3 - 9 mers

| Maximum possible score using this molecule type | | | | 12150 |
|---|---|---|---|---|
| 1 | 43 | SEQ ID NO: 8853 | 0.24% | 30 |
| 2 | 90 | SEQ ID NO: 8854 | 0.14% | 18 |
| 3 | 148 | SEQ ID NO: 8855 | 0.09% | 12 |
| 4 | 4 | SEQ ID NO: 8856 | 0.05% | 6.75 |
| 5 | 24 | SEQ ID NO: 8857 | 0.04% | 6 |
| 6 | 19 | SEQ ID NO: 8858 | 0.04% | 5.4 |
| 7 | 136 | SEQ ID NO: 8859 | 0.04% | 5.4 |
| 8 | 54 | SEQ ID NO: 8860 | 0.03% | 4.5 |
| 9 | 32 | SEQ ID NO: 8861 | 0.03% | 4 |
| 10 | 14 | SEQ ID NO: 8862 | 0.02% | 3.6 |
| 11 | 59 | SEQ ID NO: 8863 | 0.02% | 3.6 |
| 12 | 88 | SEQ ID NO: 8864 | 0.02% | 3 |
| 13 | 87 | SEQ ID NO: 8865 | 0.02% | 2.7 |
| 14 | 29 | SEQ ID NO: 8866 | 0.01% | 1.8 |
| 15 | 48 | SEQ ID NO: 8867 | 0.01% | 1.8 |
| 16 | 115 | SEQ ID NO: 8868 | 0.01% | 1.8 |
| 17 | 186 | SEQ ID NO: 8869 | 0.01% | 1.8 |
| 18 | 106 | SEQ ID NO: 8870 | 0.01% | 1.5 |
| 19 | 53 | SEQ ID NO: 8871 | 0.01% | 1.35 |
| 20 | 173 | SEQ ID NO: 8872 | 0.00% | 1.2 |

HLA A3 - 10 mers

| Maximum possible score using this molecule type | | | | 12150 |
|---|---|---|---|---|
| 1 | 24 | SEQ ID NO: 8873 | 0.22% | 27 |
| 2 | 54 | SEQ ID NO: 8874 | 0.18% | 22.5 |
| 3 | 135 | SEQ ID NO: 8875 | 0.08% | 10.8 |
| 4 | 51 | SEQ ID NO: 8876 | 0.07% | 9 |
| 5 | 13 | SEQ ID NO: 8877 | 0.06% | 8.1 |
| 6 | 26 | SEQ ID NO: 8878 | 0.04% | 6 |
| 7 | 31 | SEQ ID NO: 8879 | 0.04% | 6 |
| 8 | 90 | SEQ ID NO: 8880 | 0.04% | 6 |
| 9 | 43 | SEQ ID NO: 8881 | 0.03% | 4.5 |
| 10 | 19 | SEQ ID NO: 8882 | 0.03% | 4.05 |
| 11 | 169 | SEQ ID NO: 8883 | 0.02% | 3 |
| 12 | 87 | SEQ ID NO: 8884 | 0.02% | 2.7 |
| 13 | 84 | SEQ ID NO: 8885 | 0.01% | 1.8 |
| 14 | 88 | SEQ ID NO: 8886 | 0.01% | 1.8 |
| 15 | 94 | SEQ ID NO: 8887 | 0.01% | 1.8 |
| 16 | 64 | SEQ ID NO: 8888 | 0.00% | 1.2 |
| 17 | 131 | SEQ ID NO: 8889 | 0.00% | 1.2 |
| 18 | 99 | SEQ ID NO: 8890 | 0.00% | 1 |
| 19 | 53 | SEQ ID NO: 8891 | 0.00% | 0.9 |
| 20 | 85 | SEQ ID NO: 8892 | 0.00% | 0.9 |

HLA A24 - 9 mers

| Maximum possible score using this molecule type | | | | 1596.672 |
|---|---|---|---|---|
| 1 | 196 | SEQ ID NO: 8893 | 27.55% | 440 |
| 2 | 44 | SEQ ID NO: 8894 | 18.78% | 300 |
| 3 | 36 | SEQ ID NO: 8895 | 12.52% | 200 |
| 4 | 92 | SEQ ID NO: 8896 | 12.52% | 200 |
| 5 | 109 | SEQ ID NO: 8897 | 2.70% | 43.2 |
| 6 | 25 | SEQ ID NO: 8898 | 1.87% | 30 |
| 7 | 93 | SEQ ID NO: 8899 | 1.12% | 18 |
| 8 | 12 | SEQ ID NO: 8900 | 0.75% | 12 |
| 9 | 123 | SEQ ID NO: 8901 | 0.70% | 11.2 |
| 10 | 7 | SEQ ID NO: 8902 | 0.64% | 10.368 |
| 11 | 17 | SEQ ID NO: 8903 | 0.52% | 8.4 |
| 12 | 139 | SEQ ID NO: 8904 | 0.52% | 8.4 |
| 13 | 193 | SEQ ID NO: 8905 | 0.46% | 7.5 |
| 14 | 6 | SEQ ID NO: 8906 | 0.45% | 7.2 |
| 15 | 19 | SEQ ID NO: 8907 | 0.45% | 7.2 |
| 16 | 110 | SEQ ID NO: 8908 | 0.45% | 7.2 |
| 17 | 114 | SEQ ID NO: 8909 | 0.45% | 7.2 |
| 18 | 210 | SEQ ID NO: 8910 | 0.45% | 7.2 |
| 19 | 46 | SEQ ID NO: 8911 | 0.42% | 6.72 |
| 20 | 52 | SEQ ID NO: 8912 | 0.37% | 6 |

HLA A24 - 10 mers

| Maximum possible score using this molecule type | | | | 1596.672 |
|---|---|---|---|---|
| 1 | 92 | SEQ ID NO: 8913 | 7.51% | 120 |
| 2 | 42 | SEQ ID NO: 8914 | 2.63% | 42 |
| 3 | 109 | SEQ ID NO: 8915 | 2.25% | 36 |
| 4 | 23 | SEQ ID NO: 8916 | 1.87% | 30 |
| 5 | 34 | SEQ ID NO: 8917 | 0.75% | 12 |
| 6 | 6 | SEQ ID NO: 8918 | 0.64% | 10.368 |
| 7 | 45 | SEQ ID NO: 8919 | 0.63% | 10.08 |
| 8 | 196 | SEQ ID NO: 8920 | 0.62% | 10 |
| 9 | 44 | SEQ ID NO: 8921 | 0.56% | 9 |
| 10 | 40 | SEQ ID NO: 8922 | 0.55% | 8.8 |
| 11 | 62 | SEQ ID NO: 8923 | 0.46% | 7.5 |
| 12 | 193 | SEQ ID NO: 8924 | 0.46% | 7.5 |
| 13 | 18 | SEQ ID NO: 8925 | 0.45% | 7.2 |
| 14 | 113 | SEQ ID NO: 8926 | 0.45% | 7.2 |
| 15 | 56 | SEQ ID NO: 8927 | 0.37% | 6 |
| 16 | 176 | SEQ ID NO: 8928 | 0.37% | 6 |
| 17 | 16 | SEQ ID NO: 8929 | 0.35% | 5.6 |
| 18 | 138 | SEQ ID NO: 8930 | 0.35% | 5.6 |
| 19 | 127 | SEQ ID NO: 8931 | 0.33% | 5.28 |
| 20 | 36 | SEQ ID NO: 8932 | 0.31% | 5 |

HLA A 0201 - 9 mers

| Maximum possible score using this molecule type | | | | 3925227.1 |
|---|---|---|---|---|
| 1 | 13 | SEQ ID NO: 8933 | 0.04% | 1793.676528 |
| 2 | 87 | SEQ ID NO: 8934 | 0.03% | 1415.3832 |
| 3 | 24 | SEQ ID NO: 8935 | 0.01% | 618.0996816 |
| 4 | 19 | SEQ ID NO: 8936 | 0.00% | 223.23708 |
| 5 | 12 | SEQ ID NO: 8937 | 0.00% | 210.36400875 |
| 6 | 51 | SEQ ID NO: 8938 | 0.00% | 198.30859992 |
| 7 | 53 | SEQ ID NO: 8939 | 0.00% | 194.477328 |
| 8 | 88 | SEQ ID NO: 8940 | 0.00% | 180.58536756 |
| 9 | 106 | SEQ ID NO: 8941 | 0.00% | 169.74828 |
| 10 | 54 | SEQ ID NO: 8942 | 0.00% | 70.09848 |
| 11 | 59 | SEQ ID NO: 8943 | 0.00% | 43.42032 |
| 12 | 94 | SEQ ID NO: 8944 | 0.00% | 41.792058 |
| 13 | 20 | SEQ ID NO: 8945 | 0.00% | 37.46088108 |
| 14 | 63 | SEQ ID NO: 8946 | 0.00% | 35.73520902 |
| 15 | 22 | SEQ ID NO: 8947 | 0.00% | 20.5916435109 |
| 16 | 47 | SEQ ID NO: 8948 | 0.00% | 12.233222865 |
| 17 | 66 | SEQ ID NO: 8949 | 0.00% | 12.2199 |
| 18 | 56 | SEQ ID NO: 8950 | 0.00% | 11.486706 |
| 19 | 67 | SEQ ID NO: 8951 | 0.00% | 6.416172 |
| 20 | 117 | SEQ ID NO: 8952 | 0.00% | 5.827464 |

HLA A 0201 - 10 mers

| Maximum possible score using this molecule type | | | | 3925227.1 |
|---|---|---|---|---|
| 1 | 43 | SEQ ID NO: 8953 | 0.10% | 3977.8497792 |
| 2 | 24 | SEQ ID NO: 8954 | 0.02% | 836.2525104 |
| 3 | 51 | SEQ ID NO: 8955 | 0.02% | 815.616432 |
| 4 | 49 | SEQ ID NO: 8956 | 0.01% | 660.3245145 |
| 5 | 19 | SEQ ID NO: 8957 | 0.00% | 251.837856 |
| 6 | 59 | SEQ ID NO: 8958 | 0.00% | 159.9696 |
| 7 | 12 | SEQ ID NO: 8959 | 0.00% | 155.245377 |
| 8 | 45 | SEQ ID NO: 8960 | 0.00% | 141.1974531 |
| 9 | 21 | SEQ ID NO: 8961 | 0.00% | 117.22672269 |
| 10 | 53 | SEQ ID NO: 8962 | 0.00% | 84.55536 |
| 11 | 87 | SEQ ID NO: 8963 | 0.00% | 65.5671672 |
| 12 | 13 | SEQ ID NO: 8964 | 0.00% | 64.88888616 |
| 13 | 153 | SEQ ID NO: 8965 | 0.00% | 49.13352 |
| 14 | 178 | SEQ ID NO: 8966 | 0.00% | 26.082 |
| 15 | 18 | SEQ ID NO: 8967 | 0.00% | 24.802259691 |
| 16 | 116 | SEQ ID NO: 8968 | 0.00% | 21.5616168 |
| 17 | 65 | SEQ ID NO: 8969 | 0.00% | 20.77383 |
| 18 | 86 | SEQ ID NO: 8970 | 0.00% | 15.7068219 |
| 19 | 27 | SEQ ID NO: 8971 | 0.00% | 12.3159135 |
| 20 | 46 | SEQ ID NO: 8972 | 0.00% | 11.45624789925 |

HLA A 1101 - 9 mers

| Maximum possible score using this molecule type | | | | 36 |
|---|---|---|---|---|
| 1 | 4 | SEQ ID NO: 8973 | 12.5% | 4.5 |
| 2 | 136 | SEQ ID NO: 8974 | 3.33% | 1.2 |
| 3 | 156 | SEQ ID NO: 8975 | 3.33% | 1.2 |
| 4 | 140 | SEQ ID NO: 8976 | 1.66% | 0.6 |

HLA A 1101 - 10 mers

| Maximum possible score using this molecule type | | | | 36 |
|---|---|---|---|---|
| 1 | 169 | SEQ ID NO: 8977 | 5.55% | 2 |
| 2 | 94 | SEQ ID NO: 8978 | 3.33% | 1.2 |

HLA B7 - 9 mers

| Maximum possible score using this molecule type | | | | 5400 |
|---|---|---|---|---|
| 1 | 146 | SEQ ID NO: 8979 | 0.74% | 40 |
| 2 | 154 | SEQ ID NO: 8980 | 0.74% | 40 |
| 3 | 80 | SEQ ID NO: 8981 | 0.66% | 36 |
| 4 | 139 | SEQ ID NO: 8982 | 0.33% | 18 |
| 5 | 83 | SEQ ID NO: 8983 | 0.22% | 12 |
| 6 | 209 | SEQ ID NO: 8984 | 0.22% | 12 |
| 7 | 7 | SEQ ID NO: 8985 | 0.11% | 6 |
| 8 | 3 | SEQ ID NO: 8986 | 0.07% | 4 |
| 9 | 6 | SEQ ID NO: 8987 | 0.07% | 4 |
| 10 | 12 | SEQ ID NO: 8988 | 0.07% | 4 |
| 11 | 19 | SEQ ID NO: 8989 | 0.07% | 4 |
| 12 | 24 | SEQ ID NO: 8990 | 0.07% | 4 |
| 13 | 38 | SEQ ID NO: 8991 | 0.07% | 4 |
| 14 | 46 | SEQ ID NO: 8992 | 0.07% | 4 |
| 15 | 56 | SEQ ID NO: 8993 | 0.07% | 4 |
| 16 | 110 | SEQ ID NO: 8994 | 0.07% | 4 |
| 17 | 114 | SEQ ID NO: 8995 | 0.07% | 4 |
| 18 | 123 | SEQ ID NO: 8996 | 0.07% | 4 |
| 19 | 129 | SEQ ID NO: 8997 | 0.07% | 4 |
| 20 | 166 | SEQ ID NO: 8998 | 0.07% | 4 |

HLA B7 - 10 mers

| Maximum possible score using this molecule type | | | | 5400 |
|---|---|---|---|---|
| 1 | 56 | SEQ ID NO: 8999 | 1.48% | 80 |
| 2 | 40 | SEQ ID NO: 9000 | 0.74% | 40 |
| 3 | 127 | SEQ ID NO: 9001 | 0.74% | 40 |
| 4 | 170 | SEQ ID NO: 9002 | 0.74% | 40 |
| 5 | 140 | SEQ ID NO: 9003 | 0.27% | 15 |
| 6 | 35 | SEQ ID NO: 9004 | 0.22% | 12 |
| 7 | 79 | SEQ ID NO: 9005 | 0.22% | 12 |
| 8 | 82 | SEQ ID NO: 9006 | 0.22% | 12 |
| 9 | 208 | SEQ ID NO: 9007 | 0.22% | 12 |
| 10 | 209 | SEQ ID NO: 9008 | 0.22% | 12 |
| 11 | 80 | SEQ ID NO: 9009 | 0.16% | 9 |
| 12 | 129 | SEQ ID NO: 9010 | 0.14% | 8 |
| 13 | 138 | SEQ ID NO: 9011 | 0.11% | 6 |
| 14 | 73 | SEQ ID NO: 9012 | 0.09% | 5 |
| 15 | 2 | SEQ ID NO: 9013 | 0.07% | 4 |
| 16 | 5 | SEQ ID NO: 9014 | 0.07% | 4 |
| 17 | 6 | SEQ ID NO: 9015 | 0.07% | 4 |
| 18 | 16 | SEQ ID NO: 9016 | 0.07% | 4 |
| 19 | 18 | SEQ ID NO: 9017 | 0.07% | 4 |
| 20 | 24 | SEQ ID NO: 9018 | 0.07% | 4 |

[1681] TABLE 21
Epitopes for SEQ ID NO: 6047

| | | | | |
|---|---|---|---|---|
| | Start | | % of max. | |
| Rank | position | Sequence | score | Score |

HLA A1 - 9 mers

| Maximum possible score using this molecule type | | | | 5625 |
|---|---|---|---|---|
| 1 | 53 | SEQ ID NO: 9019 | 2% | 112.5 |
| 2 | 10 | SEQ ID NO: 9020 | 0.08% | 4.5 |
| 3 | 33 | SEQ ID NO: 9021 | 0.02% | 1.5 |
| 4 | 3 | SEQ ID NO: 9022 | 0.00% | 0.5 |
| 5 | 27 | SEQ ID NO: 9023 | 0.00% | 0.5 |
| 6 | 29 | SEQ ID NO: 9024 | 0.00% | 0.5 |

HLA A1 - 10 mers

| Maximum possible score using this molecule type | | | | 5625 |
|---|---|---|---|---|
| 1 | 10 | SEQ ID NO: 9025 | 0.8% | 45 |
| 2 | 52 | SEQ ID NO: 9026 | 0.2% | 11.25 |
| 3 | 50 | SEQ ID NO: 9027 | 0.04% | 2.5 |
| 4 | 32 | SEQ ID NO: 9028 | 0.02% | 1.5 |
| 5 | 48 | SEQ ID NO: 9029 | 0.02% | 1.35 |
| 6 | 27 | SEQ ID NO: 9030 | 0.00% | 0.5 |

HLA A3 - 9 mers

| Maximum possible score using this molecule type | | | | 12150 |
|---|---|---|---|---|
| 1 | 38 | SEQ ID NO: 9031 | 1.85% | 225 |
| 2 | 17 | SEQ ID NO: 9032 | 0.02% | 3.6 |
| 3 | 2 | SEQ ID NO: 9033 | 0.02% | 2.7 |
| 4 | 37 | SEQ ID NO: 9034 | 0.01% | 1.8 |
| 5 | 27 | SEQ ID NO: 9035 | 0.01% | 1.35 |
| 6 | 13 | SEQ ID NO: 9036 | 0.00% | 0.675 |
| 7 | 14 | SEQ ID NO: 9037 | 0.00% | 0.6 |

HLA A3 - 10 mers

| Maximum possible score using this molecule type | | | | 12150 |
|---|---|---|---|---|
| 1 | 13 | SEQ ID NO: 9038 | 0.04% | 6 |
| 2 | 37 | SEQ ID NO: 9039 | 0.01% | 2.025 |
| 3 | 2 | SEQ ID NO: 9040 | 0.00% | 0.9 |
| 4 | 19 | SEQ ID NO: 9041 | 0.00% | 0.675 |
| 5 | 16 | SEQ ID NO: 9042 | 0.00% | 0.54 |

HLA A24 - 9 mers

| Maximum possible score using this molecule type | | | | 1596.672 |
|---|---|---|---|---|
| 1 | 20 | SEQ ID NO: 9043 | 1.25% | 20 |
| 2 | 6 | SEQ ID NO: 9044 | 0.52% | 8.4 |
| 3 | 5 | SEQ ID NO: 9045 | 0.51% | 8.25 |
| 4 | 35 | SEQ ID NO: 9046 | 0.36% | 5.76 |
| 5 | 31 | SEQ ID NO: 9047 | 0.35% | 5.6 |
| 6 | 43 | SEQ ID NO: 9048 | 0.27% | 4.4 |
| 7 | 13 | SEQ ID NO: 9049 | 0.26% | 4.2 |
| 8 | 32 | SEQ ID NO: 9050 | 0.21% | 3.36 |
| 9 | 2 | SEQ ID NO: 9051 | 0.11% | 1.8 |
| 10 | 9 | SEQ ID NO: 9052 | 0.10% | 1.68 |
| 11 | 8 | SEQ ID NO: 9053 | 0.09% | 1.5 |
| 12 | 15 | SEQ ID NO: 9054 | 0.09% | 1.5 |
| 13 | 23 | SEQ ID NO: 9055 | 0.09% | 1.5 |
| 14 | 27 | SEQ ID NO: 9056 | 0.08% | 1.4 |
| 15 | 24 | SEQ ID NO: 9057 | 0.07% | 1.2 |
| 16 | 7 | SEQ ID NO: 9058 | 0.06% | 1 |
| 17 | 17 | SEQ ID NO: 9059 | 0.06% | 1 |
| 18 | 10 | SEQ ID NO: 9060 | 0.05% | 0.9 |
| 19 | 39 | SEQ ID NO: 9061 | 0.04% | 0.792 |
| 20 | 47 | SEQ ID NO: 9062 | 0.04% | 0.792 |

HLA A24 - 10 mers

| Maximum possible score using this molecule type | | | | 1596.672 |
|---|---|---|---|---|
| 1 | 5 | SEQ ID NO: 9063 | 2.63% | 42 |
| 2 | 34 | SEQ ID NO: 9064 | 0.54% | 8.64 |
| 3 | 30 | SEQ ID NO: 9065 | 0.52% | 8.4 |
| 4 | 19 | SEQ ID NO: 9066 | 0.50% | 8 |
| 5 | 50 | SEQ ID NO: 9067 | 0.33% | 5.28 |
| 6 | 12 | SEQ ID NO: 9068 | 0.26% | 4.2 |
| 7 | 31 | SEQ ID NO: 9069 | 0.21% | 3.36 |
| 8 | 26 | SEQ ID NO: 9070 | 0.15% | 2.52 |
| 9 | 8 | SEQ ID NO: 9071 | 0.13% | 2.1 |
| 10 | 22 | SEQ ID NO: 9072 | 0.12% | 2 |
| 11 | 23 | SEQ ID NO: 9073 | 0.11% | 1.8 |
| 12 | 6 | SEQ ID NO: 9074 | 0.09% | 1.5 |
| 13 | 14 | SEQ ID NO: 9075 | 0.09% | 1.5 |
| 14 | 16 | SEQ ID NO: 9076 | 0.09% | 1.5 |
| 15 | 7 | SEQ ID NO: 9077 | 0.06% | 1 |
| 16 | 48 | SEQ ID NO: 9078 | 0.04% | 0.75 |
| 17 | 0 | SEQ ID NO: 9079 | 0.04% | 0.72 |
| 18 | 9 | SEQ ID NO: 9080 | 0.04% | 0.72 |
| 19 | 47 | SEQ ID NO: 9081 | 0.04% | 0.66 |
| 20 | 39 | SEQ ID NO: 9082 | 0.03% | 0.6 |

HLA A 0201 - 9 mers

| Maximum possible score using this molecule type | | | | 3925227.1 |
|---|---|---|---|---|
| 1 | 15 | SEQ ID NO: 9083 | 0.00% | 14.1442686 |
| 2 | 27 | SEQ ID NO: 9084 | 0.00% | 9.598176 |
| 3 | 22 | SEQ ID NO: 9085 | 0.00% | 9.5634 |
| 4 | 9 | SEQ ID NO: 9086 | 0.00% | 5.546246013 |
| 5 | 2 | SEQ ID NO: 9087 | 0.00% | 5.526462816 |
| 6 | 24 | SEQ ID NO: 9088 | 0.00% | 4.88163753 |
| 7 | 17 | SEQ ID NO: 9089 | 0.00% | 3.699285408 |
| 8 | 31 | SEQ ID NO: 9090 | 0.00% | 2.29699206 |
| 9 | 6 | SEQ ID NO: 9091 | 0.00% | 2.0016040674 |
| 10 | 7 | SEQ ID NO: 9092 | 0.00% | 0.91287 |
| 11 | 49 | SEQ ID NO: 9093 | 0.00% | 0.71805678 |
| 12 | 16 | SEQ ID NO: 9094 | 0.00% | 0.6694257042 |
| 13 | 12 | SEQ ID NO: 9095 | 0.00% | 0.6539828625 |

HLA A 0201 - 10 mers

| Maximum possible score using this molecule type | | | | 3925227.1 |
|---|---|---|---|---|
| 1 | 16 | SEQ ID NO: 9096 | 0.00% | 34.28765802 |
| 2 | 19 | SEQ ID NO: 9097 | 0.00% | 18.9368775 |
| 3 | 14 | SEQ ID NO: 9098 | 0.00% | 14.1442686 |
| 4 | 27 | SEQ ID NO: 9099 | 0.00% | 11.406528 |
| 5 | 26 | SEQ ID NO: 9100 | 0.00% | 10.9304361558 |
| 6 | 34 | SEQ ID NO: 9101 | 0.00% | 5.580927 |
| 7 | 6 | SEQ ID NO: 9102 | 0.00% | 4.865742 |
| 8 | 9 | SEQ ID NO: 9103 | 0.00% | 2.64106953 |
| 9 | 50 | SEQ ID NO: 9104 | 0.00% | 2.6275752 |
| 10 | 30 | SEQ ID NO: 9105 | 0.00% | 2.29699206 |
| 11 | 7 | SEQ ID NO: 9106 | 0.00% | 0.86083641 |
| 12 | 42 | SEQ ID NO: 9107 | 0.00% | 0.7049592 |
| 13 | 22 | SEQ ID NO: 9108 | 0.00% | 0.6628440357 |
| 14 | 2 | SEQ ID NO: 9109 | 0.00% | 0.6530644656 |

HLA A 1101 - 9 mers

| Maximum possible score using this molecule type | | | | 36 |
|---|---|---|---|---|
| 1 | 37 | SEQ ID NO: 9110 | 15% | 5.4 |
| 2 | 38 | SEQ ID NO: 9111 | 2.22% | 0.8 |

HLA A 1101 - 10 mers

| Maximum possible score using this molecule type | | | | 36 |
|---|---|---|---|---|
| 1 | 37 | SEQ ID NO: 9112 | 7.5% | 2.7 |

HLA B7 - 9 mers

| Maximum possible score using this molecule type | | | | 5400 |
|---|---|---|---|---|
| 1 | 35 | SEQ ID NO: 9113 | 3.70% | 200 |
| 2 | 17 | SEQ ID NO: 9114 | 0.11% | 6 |
| 3 | 6 | SEQ ID NO: 9115 | 0.07% | 4 |
| 4 | 20 | SEQ ID NO: 9116 | 0.07% | 4 |
| 5 | 31 | SEQ ID NO: 9117 | 0.07% | 4 |
| 6 | 43 | SEQ ID NO: 9118 | 0.07% | 4 |
| 7 | 7 | SEQ ID NO: 9119 | 0.03% | 2 |
| 8 | 23 | SEQ ID NO: 9120 | 0.02% | 1.2 |
| 9 | 24 | SEQ ID NO: 9121 | 0.02% | 1.2 |
| 10 | 10 | SEQ ID NO: 9122 | 0.01% | 0.9 |

HLA B7 - 10 mers

| Maximum possible score using this molecule type | | | | 5400 |
|---|---|---|---|---|
| 1 | 35 | SEQ ID NO: 9123 | 0.09% | 5 |
| 2 | 19 | SEQ ID NO: 9124 | 0.07% | 4 |
| 3 | 30 | SEQ ID NO: 9125 | 0.07% | 4 |
| 4 | 34 | SEQ ID NO: 9126 | 0.07% | 4 |
| 5 | 7 | SEQ ID NO: 9127 | 0.03% | 2 |
| 6 | 16 | SEQ ID NO: 9128 | 0.03% | 1.8 |
| 7 | 23 | SEQ ID NO: 9129 | 0.02% | 1.2 |
| 8 | 50 | SEQ ID NO: 9130 | 0.02% | 1.2 |
| 9 | 9 | SEQ ID NO: 9131 | 0.01% | 1 |

[1682] TABLE 22
Epitopes for SEQ ID NO: 6048

| | | | | |
|---|---|---|---|---|
| | Start | | % of max. | |
| Rank | position | Sequence | score | Score |

HLA A1 - 9 mers

| Maximum possible score using this molecule type | | | | 5625 |
|---|---|---|---|---|
| 1 | 66 | SEQ ID NO: 9132 | 0.44% | 25 |
| 2 | 80 | SEQ ID NO: 9133 | 0.08% | 5 |
| 3 | 93 | SEQ ID NO: 9134 | 0.04% | 2.7 |
| 4 | 11 | SEQ ID NO: 9135 | 0.04% | 2.5 |
| 5 | 89 | SEQ ID NO: 9136 | 0.04% | 2.25 |
| 6 | 48 | SEQ ID NO: 9137 | 0.01% | 1 |
| 7 | 3 | SEQ ID NO: 9138 | 0.00% | 0.5 |
| 8 | 9 | SEQ ID NO: 9139 | 0.00% | 0.5 |
| 9 | 56 | SEQ ID NO: 9140 | 0.00% | 0.5 |
| 10 | 101 | SEQ ID NO: 9141 | 0.00% | 0.5 |
| 11 | 106 | SEQ ID NO: 9142 | 0.00% | 0.5 |
| 12 | 110 | SEQ ID NO: 9143 | 0.00% | 0.5 |

HLA A1 - 10 mers

| Maximum possible score using this molecule type | | | | 5625 |
|---|---|---|---|---|
| 1 | 30 | SEQ ID NO: 9144 | 0.4% | 22.5 |
| 2 | 88 | SEQ ID NO: 9145 | 0.12% | 6.75 |
| 3 | 48 | SEQ ID NO: 9146 | 0.04% | 2.5 |
| 4 | 55 | SEQ ID NO: 9147 | 0.02% | 1.25 |
| 5 | 13 | SEQ ID NO: 9148 | 0.01% | 0.9 |
| 6 | 79 | SEQ ID NO: 9149 | 0.01% | 0.75 |
| 7 | 93 | SEQ ID NO: 9150 | 0.01% | 0.675 |
| 8 | 2 | SEQ ID NO: 9151 | 0.00% | 0.5 |
| 9 | 8 | SEQ ID NO: 9152 | 0.00% | 0.5 |
| 10 | 65 | SEQ ID NO: 9153 | 0.00% | 0.5 |
| 11 | 66 | SEQ ID NO: 9154 | 0.00% | 0.5 |
| 12 | 80 | SEQ ID NO: 9155 | 0.00% | 0.5 |
| 13 | 105 | SEQ ID NO: 9156 | 0.00% | 0.5 |
| 14 | 109 | SEQ ID NO: 9157 | 0.00% | 0.5 |

HLA A3 - 9 mers

| Maximum possible score using this molecule type | | | | 12150 |
|---|---|---|---|---|
| 1 | 109 | SEQ ID NO: 9158 | 0.74% | 90 |
| 2 | 3 | SEQ ID NO: 9159 | 0.24% | 30 |
| 3 | 111 | SEQ ID NO: 9160 | 0.12% | 15 |
| 4 | 106 | SEQ ID NO: 9161 | 0.07% | 9 |
| 5 | 95 | SEQ ID NO: 9162 | 0.05% | 6.075 |
| 6 | 101 | SEQ ID NO: 9163 | 0.04% | 6 |
| 7 | 110 | SEQ ID NO: 9164 | 0.02% | 3.6 |
| 8 | 84 | SEQ ID NO: 9165 | 0.02% | 3 |
| 9 | 80 | SEQ ID NO: 9166 | 0.02% | 2.7 |
| 10 | 37 | SEQ ID NO: 9167 | 0.01% | 2.25 |
| 11 | 9 | SEQ ID NO: 9168 | 0.01% | 2 |
| 12 | 54 | SEQ ID NO: 9169 | 0.01% | 2 |
| 13 | 99 | SEQ ID NO: 9170 | 0.01% | 1.35 |
| 14 | 1 | SEQ ID NO: 9171 | 0.01% | 1.215 |
| 15 | 11 | SEQ ID NO: 9172 | 0.00% | 0.9 |
| 16 | 15 | SEQ ID NO: 9173 | 0.00% | 0.9 |
| 17 | 69 | SEQ ID NO: 9174 | 0.00% | 0.6 |
| 18 | 5 | SEQ ID NO: 9175 | 0.00% | 0.54 |
| 19 | 103 | SEQ ID NO: 9176 | 0.00% | 0.54 |

HLA A3 - 10 mers

| Maximum possible score using this molecule type | | | | 12150 |
|---|---|---|---|---|
| 1 | 75 | SEQ ID NO: 9177 | 0.49% | 60 |
| 2 | 109 | SEQ ID NO: 9178 | 0.29% | 36 |
| 3 | 22 | SEQ ID NO: 9179 | 0.14% | 18 |
| 4 | 15 | SEQ ID NO: 9180 | 0.04% | 6 |
| 5 | 110 | SEQ ID NO: 9181 | 0.01% | 2.25 |
| 6 | 95 | SEQ ID NO: 9182 | 0.01% | 1.8 |
| 7 | 101 | SEQ ID NO: 9183 | 0.01% | 1.35 |
| 8 | 43 | SEQ ID NO: 9184 | 0.00% | 1 |
| 9 | 2 | SEQ ID NO: 9185 | 0.00% | 0.9 |
| 10 | 5 | SEQ ID NO: 9186 | 0.00% | 0.9 |
| 11 | 7 | SEQ ID NO: 9187 | 0.00% | 0.9 |
| 12 | 107 | SEQ ID NO: 9188 | 0.00% | 0.9 |
| 13 | 102 | SEQ ID NO: 9189 | 0.00% | 0.81 |
| 14 | 3 | SEQ ID NO: 9190 | 0.00% | 0.75 |
| 15 | 8 | SEQ ID NO: 9191 | 0.00% | 0.6 |
| 16 | 103 | SEQ ID NO: 9192 | 0.00% | 0.54 |

HLA A24 - 9 mers

| Maximum possible score using this molecule type | | | | 1596.672 |
|---|---|---|---|---|
| 1 | 88 | SEQ ID NO: 9193 | 1.66% | 26.6112 |
| 2 | 77 | SEQ ID NO: 9194 | 0.77% | 12.32 |
| 3 | 18 | SEQ ID NO: 9195 | 0.56% | 9 |
| 4 | 108 | SEQ ID NO: 9196 | 0.56% | 9 |
| 5 | 92 | SEQ ID NO: 9197 | 0.54% | 8.64 |
| 6 | 96 | SEQ ID NO: 9198 | 0.54% | 8.64 |
| 7 | 73 | SEQ ID NO: 9199 | 0.46% | 7.5 |
| 8 | 40 | SEQ ID NO: 9200 | 0.45% | 7.2 |
| 9 | 104 | SEQ ID NO: 9201 | 0.42% | 6.72 |
| 10 | 8 | SEQ ID NO: 9202 | 0.41% | 6.6 |
| 11 | 21 | SEQ ID NO: 9203 | 0.37% | 6 |
| 12 | 102 | SEQ ID NO: 9204 | 0.37% | 6 |
| 13 | 22 | SEQ ID NO: 9205 | 0.25% | 4 |
| 14 | 68 | SEQ ID NO: 9206 | 0.25% | 4 |
| 15 | 106 | SEQ ID NO: 9207 | 0.22% | 3.6 |
| 16 | 1 | SEQ ID NO: 9208 | 0.18% | 3 |
| 17 | 79 | SEQ ID NO: 9209 | 0.18% | 3 |
| 18 | 93 | SEQ ID NO: 9210 | 0.18% | 3 |
| 19 | 101 | SEQ ID NO: 9211 | 0.18% | 3 |
| 20 | 37 | SEQ ID NO: 9212 | 0.15% | 2.4 |

HLA A24 - 10 mers

| Maximum possible score using this molecule type | | | | 1596.672 |
|---|---|---|---|---|
| 1 | 100 | SEQ ID NO: 9213 | 0.93% | 15 |
| 2 | 18 | SEQ ID NO: 9214 | 0.78% | 12.6 |
| 3 | 98 | SEQ ID NO: 9215 | 0.52% | 8.4 |
| 4 | 73 | SEQ ID NO: 9216 | 0.46% | 7.5 |
| 5 | 91 | SEQ ID NO: 9217 | 0.45% | 7.2 |
| 6 | 103 | SEQ ID NO: 9218 | 0.42% | 6.72 |
| 7 | 7 | SEQ ID NO: 9219 | 0.41% | 6.6 |
| 8 | 21 | SEQ ID NO: 9220 | 0.37% | 6 |
| 9 | 46 | SEQ ID NO: 9221 | 0.37% | 6 |
| 10 | 93 | SEQ ID NO: 9222 | 0.37% | 6 |
| 11 | 96 | SEQ ID NO: 9223 | 0.37% | 6 |
| 12 | 101 | SEQ ID NO: 9224 | 0.37% | 6 |
| 13 | 77 | SEQ ID NO: 9225 | 0.25% | 4 |
| 14 | 92 | SEQ ID NO: 9226 | 0.22% | 3.6 |
| 15 | 105 | SEQ ID NO: 9227 | 0.22% | 3.6 |
| 16 | 2 | SEQ ID NO: 9228 | 0.18% | 3 |
| 17 | 53 | SEQ ID NO: 9229 | 0.18% | 3 |
| 18 | 36 | SEQ ID NO: 9230 | 0.12% | 2 |
| 19 | 55 | SEQ ID NO: 9231 | 0.12% | 2 |
| 20 | 102 | SEQ ID NO: 9232 | 0.11% | 1.8 |

HLA A 0201 - 9 mers

| Maximum possible score using this molecule type | | | | 3925227.1 |
|---|---|---|---|---|
| 1 | 84 | SEQ ID NO: 9233 | 0.01% | 441.342216 |
| 2 | 102 | SEQ ID NO: 9234 | 0.00% | 63.16728165 |
| 3 | 107 | SEQ ID NO: 9235 | 0.00% | 51.882640425 |
| 4 | 1 | SEQ ID NO: 9236 | 0.00% | 43.8816609 |
| 5 | 95 | SEQ ID NO: 9237 | 0.00% | 33.40165248 |
| 6 | 2 | SEQ ID NO: 9238 | 0.00% | 24.66305226 |
| 7 | 92 | SEQ ID NO: 9239 | 0.00% | 22.64458905 |
| 8 | 103 | SEQ ID NO: 9240 | 0.00% | 20.70206586 |
| 9 | 47 | SEQ ID NO: 9241 | 0.00% | 11.175953184 |
| 10 | 94 | SEQ ID NO: 9242 | 0.00% | 8.452983 |
| 11 | 15 | SEQ ID NO: 9243 | 0.00% | 8.1793152 |
| 12 | 8 | SEQ ID NO: 9244 | 0.00% | 4.993461 |
| 13 | 5 | SEQ ID NO: 9245 | 0.00% | 4.57284528 |
| 14 | 99 | SEQ ID NO: 9246 | 0.00% | 3.999468528 |
| 15 | 105 | SEQ ID NO: 9247 | 0.00% | 2.231322 |
| 16 | 20 | SEQ ID NO: 9248 | 0.00% | 1.3524 |
| 17 | 62 | SEQ ID NO: 9249 | 0.00% | 0.8631693 |
| 18 | 6 | SEQ ID NO: 9250 | 0.00% | 0.824619 |
| 19 | 57 | SEQ ID NO: 9251 | 0.00% | 0.72105 |
| 20 | 58 | SEQ ID NO: 9252 | 0.00% | 0.7147572 |

HLA A 0201 - 10 mers

| Maximum possible score using this molecule type | | | | 3925227.1 |
|---|---|---|---|---|
| 1 | 101 | SEQ ID NO: 9253 | 0.03% | 1243.078056 |
| 2 | 3 | SEQ ID NO: 9254 | 0.01% | 592.944462 |
| 3 | 106 | SEQ ID NO: 9255 | 0.00% | 94.2678 |
| 4 | 5 | SEQ ID NO: 9256 | 0.00% | 43.42032 |
| 5 | 107 | SEQ ID NO: 9257 | 0.00% | 33.30332334 |
| 6 | 102 | SEQ ID NO: 9258 | 0.00% | 32.53181778 |
| 7 | 54 | SEQ ID NO: 9259 | 0.00% | 27.324 |
| 8 | 7 | SEQ ID NO: 9260 | 0.00% | 21.3624 |
| 9 | 1 | SEQ ID NO: 9261 | 0.00% | 13.723479 |
| 10 | 95 | SEQ ID NO: 9262 | 0.00% | 13.00344192 |
| 11 | 94 | SEQ ID NO: 9263 | 0.00% | 10.01276388 |
| 12 | 99 | SEQ ID NO: 9264 | 0.00% | 5.6615328 |
| 13 | 39 | SEQ ID NO: 9265 | 0.00% | 3.6304212 |
| 14 | 111 | SEQ ID NO: 9266 | 0.00% | 2.53368 |
| 15 | 103 | SEQ ID NO: 9267 | 0.00% | 2.475394803 |
| 16 | 14 | SEQ ID NO: 9268 | 0.00% | 2.4519012 |
| 17 | 19 | SEQ ID NO: 9269 | 0.00% | 2.07604992 |
| 18 | 29 | SEQ ID NO: 9270 | 0.00% | 1.8179154 |
| 19 | 57 | SEQ ID NO: 9271 | 0.00% | 1.52076 |
| 20 | 47 | SEQ ID NO: 9272 | 0.00% | 1.27712376 |

HLA A 1101 - 9 mers

| Maximum possible score using this molecule type | | | | 36 |
|---|---|---|---|---|
| 1 | 80 | SEQ ID NO: 9273 | 3.33% | 1.2 |
| 2 | 69 | SEQ ID NO: 9274 | 1.66% | 0.6 |
| 3 | 109 | SEQ ID NO: 9275 | 1.66% | 0.6 |

HLA A 1101 - 10 mers

| Maximum possible score using this molecule type | | | | 36 |
|---|---|---|---|---|
| 1 | 22 | SEQ ID NO: 9276 | 11.11% | 4 |

HLA B7 - 9 mers

| Maximum possible score using this molecule type | | | | 5400 |
|---|---|---|---|---|
| 1 | 22 | SEQ ID NO: 9277 | 3.70% | 200 |
| 2 | 77 | SEQ ID NO: 9278 | 2.22% | 120 |
| 3 | 104 | SEQ ID NO: 9279 | 0.22% | 12 |
| 4 | 40 | SEQ ID NO: 9280 | 0.11% | 6 |
| 5 | 8 | SEQ ID NO: 9281 | 0.07% | 4 |
| 6 | 21 | SEQ ID NO: 9282 | 0.07% | 4 |
| 7 | 68 | SEQ ID NO: 9283 | 0.07% | 4 |
| 8 | 92 | SEQ ID NO: 9284 | 0.07% | 4 |
| 9 | 102 | SEQ ID NO: 9285 | 0.07% | 4 |
| 10 | 46 | SEQ ID NO: 9286 | 0.03% | 2 |
| 11 | 98 | SEQ ID NO: 9287 | 0.03% | 2 |
| 12 | 103 | SEQ ID NO: 9288 | 0.03% | 2 |
| 13 | 88 | SEQ ID NO: 9289 | 0.02% | 1.2 |
| 14 | 105 | SEQ ID NO: 9290 | 0.01% | 0.9 |
| 15 | 43 | SEQ ID NO: 9291 | 0.01% | 0.6 |
| 16 | 79 | SEQ ID NO: 9292 | 0.01% | 0.6 |
| 17 | 95 | SEQ ID NO: 9293 | 0.01% | 0.6 |
| 18 | 107 | SEQ ID NO: 9294 | 0.00% | 0.5 |

HLA B7 - 10 mers

| Maximum possible score using this molecule type | | | | 5400 |
|---|---|---|---|---|
| 1 | 46 | SEQ ID NO: 9295 | 1.48% | 80 |
| 2 | 98 | SEQ ID NO: 9296 | 1.48% | 80 |
| 3 | 91 | SEQ ID NO: 9297 | 0.37% | 20 |
| 4 | 103 | SEQ ID NO: 9298 | 0.37% | 20 |
| 5 | 7 | SEQ ID NO: 9299 | 0.07% | 4 |
| 6 | 21 | SEQ ID NO: 9300 | 0.07% | 4 |
| 7 | 101 | SEQ ID NO: 9301 | 0.07% | 4 |
| 8 | 107 | SEQ ID NO: 9302 | 0.03% | 2 |
| 9 | 67 | SEQ ID NO: 9303 | 0.02% | 1.2 |
| 10 | 93 | SEQ ID NO: 9304 | 0.02% | 1.2 |
| 11 | 69 | SEQ ID NO: 9305 | 0.01% | 1 |
| 12 | 39 | SEQ ID NO: 9306 | 0.01% | 0.6 |
| 13 | 77 | SEQ ID NO: 9307 | 0.01% | 0.6 |
| 14 | 22 | SEQ ID NO: 9308 | 0.00% | 0.5 |

[1683] TABLE 23
Epitopes for SEQ ID NO: 6049

| | | | | |
|---|---|---|---|---|
| | Start | | % of max. | |
| Rank | position | Sequence | score | Score |

HLA A1 - 9 mers

| Maximum possible score using this molecule type | | | | 5625 |
|---|---|---|---|---|
| 1 | 0 | SEQ ID NO: 9309 | 0.2% | 11.25 |
| 2 | 35 | SEQ ID NO: 9310 | 0.01% | 0.9 |
| 3 | 4 | SEQ ID NO: 9311 | 0.00% | 0.5 |
| 4 | 5 | SEQ ID NO: 9312 | 0.00% | 0.5 |
| 5 | 10 | SEQ ID NO: 9313 | 0.00% | 0.5 |
| 6 | 19 | SEQ ID NO: 9314 | 0.00% | 0.5 |
| 7 | 21 | SEQ ID NO: 9315 | 0.00% | 0.5 |

HLA A1 - 10 mers

| Maximum possible score using this molecule type | | | | 5625 |
|---|---|---|---|---|
| 1 | 0 | SEQ ID NO: 9316 | 0.2% | 11.25 |
| 2 | 5 | SEQ ID NO: 9317 | 0.04% | 2.5 |
| 3 | 33 | SEQ ID NO: 9318 | 0.02% | 1.5 |
| 4 | 3 | SEQ ID NO: 9319 | 0.02% | 1.25 |
| 5 | 9 | SEQ ID NO: 9320 | 0.00% | 0.5 |
| 6 | 18 | SEQ ID NO: 9321 | 0.00% | 0.5 |
| 7 | 20 | SEQ ID NO: 9322 | 0.00% | 0.5 |

HLA A3 - 9 mers

| Maximum possible score using this molecule type | | | | 12150 |
|---|---|---|---|---|
| 1 | 4 | SEQ ID NO: 9323 | 0.14% | 18 |
| 2 | 16 | SEQ ID NO: 9324 | 0.11% | 13.5 |
| 3 | 23 | SEQ ID NO: 9325 | 0.06% | 8.1 |
| 4 | 18 | SEQ ID NO: 9326 | 0.03% | 4.05 |
| 5 | 21 | SEQ ID NO: 9327 | 0.01% | 2.025 |
| 6 | 9 | SEQ ID NO: 9328 | 0.01% | 1.8 |
| 7 | 15 | SEQ ID NO: 9329 | 0.01% | 1.8 |
| 8 | 25 | SEQ ID NO: 9330 | 0.01% | 1.8 |
| 9 | 12 | SEQ ID NO: 9331 | 0.00% | 0.9 |
| 10 | 19 | SEQ ID NO: 9332 | 0.00% | 0.9 |
| 11 | 20 | SEQ ID NO: 9333 | 0.00% | 0.9 |
| 12 | 2 | SEQ ID NO: 9334 | 0.00% | 0.81 |
| 13 | 22 | SEQ ID NO: 9335 | 0.00% | 0.81 |
| 14 | 10 | SEQ ID NO: 9336 | 0.00% | 0.6 |

HLA A3 - 10 mers

| Maximum possible score using this molecule type | | | | 12150 |
|---|---|---|---|---|
| 1 | 20 | SEQ ID NO: 9337 | 0.16% | 20.25 |
| 2 | 9 | SEQ ID NO: 9338 | 0.09% | 12 |
| 3 | 16 | SEQ ID NO: 9339 | 0.07% | 9 |
| 4 | 18 | SEQ ID NO: 9340 | 0.07% | 9 |
| 5 | 22 | SEQ ID NO: 9341 | 0.06% | 8.1 |
| 6 | 4 | SEQ ID NO: 9342 | 0.03% | 4.05 |
| 7 | 15 | SEQ ID NO: 9343 | 0.03% | 4.05 |
| 8 | 12 | SEQ ID NO: 9344 | 0.02% | 3.6 |
| 9 | 3 | SEQ ID NO: 9345 | 0.00% | 0.9 |
| 10 | 33 | SEQ ID NO: 9346 | 0.00% | 0.6 |
| 11 | 2 | SEQ ID NO: 9347 | 0.00% | 0.54 |
| 12 | 24 | SEQ ID NO: 9348 | 0.00% | 0.54 |

HLA A24 - 9 mers

| Maximum possible score using this molecule type | | | | 1596.672 |
|---|---|---|---|---|
| 1 | 8 | SEQ ID NO: 9349 | 18.78% | 300 |
| 2 | 11 | SEQ ID NO: 9350 | 1.87% | 30 |
| 3 | 28 | SEQ ID NO: 9351 | 1.50% | 24 |
| 4 | 7 | SEQ ID NO: 9352 | 0.75% | 12 |
| 5 | 17 | SEQ ID NO: 9353 | 0.56% | 9 |
| 6 | 14 | SEQ ID NO: 9354 | 0.46% | 7.5 |
| 7 | 23 | SEQ ID NO: 9355 | 0.37% | 6 |
| 8 | 13 | SEQ ID NO: 9356 | 0.36% | 5.76 |
| 9 | 2 | SEQ ID NO: 9357 | 0.35% | 5.6 |
| 10 | 16 | SEQ ID NO: 9358 | 0.35% | 5.6 |
| 11 | 9 | SEQ ID NO: 9359 | 0.30% | 4.8 |
| 12 | 21 | SEQ ID NO: 9360 | 0.26% | 4.2 |
| 13 | 5 | SEQ ID NO: 9361 | 0.25% | 4 |
| 14 | 4 | SEQ ID NO: 9362 | 0.22% | 3.6 |
| 15 | 0 | SEQ ID NO: 9363 | 0.18% | 3 |
| 16 | 19 | SEQ ID NO: 9364 | 0.18% | 3 |
| 17 | 10 | SEQ ID NO: 9365 | 0.15% | 2.4 |
| 18 | 18 | SEQ ID NO: 9366 | 0.13% | 2.1 |
| 19 | 25 | SEQ ID NO: 9367 | 0.06% | 1.1 |
| 20 | 15 | SEQ ID NO: 9368 | 0.05% | 0.9 |

HLA A24 - 10 mers

| Maximum possible score using this molecule type | | | | 1596.672 |
|---|---|---|---|---|
| 1 | 8 | SEQ ID NO: 9369 | 22.54% | 360 |
| 2 | 7 | SEQ ID NO: 9370 | 1.25% | 20 |
| 3 | 17 | SEQ ID NO: 9371 | 0.65% | 10.5 |
| 4 | 15 | SEQ ID NO: 9372 | 0.52% | 8.4 |
| 5 | 4 | SEQ ID NO: 9373 | 0.45% | 7.2 |
| 6 | 22 | SEQ ID NO: 9374 | 0.37% | 6 |
| 7 | 12 | SEQ ID NO: 9375 | 0.36% | 5.76 |
| 8 | 27 | SEQ ID NO: 9376 | 0.30% | 4.8 |
| 9 | 14 | SEQ ID NO: 9377 | 0.28% | 4.5 |
| 10 | 20 | SEQ ID NO: 9378 | 0.26% | 4.2 |
| 11 | 10 | SEQ ID NO: 9379 | 0.25% | 4 |
| 12 | 3 | SEQ ID NO: 9380 | 0.18% | 3 |
| 13 | 18 | SEQ ID NO: 9381 | 0.18% | 3 |
| 14 | 9 | SEQ ID NO: 9382 | 0.15% | 2.4 |
| 15 | 24 | SEQ ID NO: 9383 | 0.10% | 1.65 |
| 16 | 16 | SEQ ID NO: 9384 | 0.07% | 1.2 |
| 17 | 13 | SEQ ID NO: 9385 | 0.06% | 1 |
| 18 | 11 | SEQ ID NO: 9386 | 0.05% | 0.9 |
| 19 | 1 | SEQ ID NO: 9387 | 0.05% | 0.84 |

HLA A 0201 - 9 mers

| Maximum possible score using this molecule type | | | | 3925227.1 |
|---|---|---|---|---|
| 1 | 12 | SEQ ID NO: 9388 | 0.10% | 4267.988928 |
| 2 | 23 | SEQ ID NO: 9389 | 0.03% | 1360.69088544 |
| 3 | 9 | SEQ ID NO: 9390 | 0.01% | 569.948832 |
| 4 | 16 | SEQ ID NO: 9391 | 0.00% | 309.0498408 |
| 5 | 15 | SEQ ID NO: 9392 | 0.00% | 79.73570448 |
| 6 | 2 | SEQ ID NO: 9393 | 0.00% | 51.109542 |
| 7 | 18 | SEQ ID NO: 9394 | 0.00% | 45.25539984 |
| 8 | 25 | SEQ ID NO: 9395 | 0.00% | 34.28765802 |
| 9 | 22 | SEQ ID NO: 9396 | 0.00% | 26.532116325 |
| 10 | 5 | SEQ ID NO: 9397 | 0.00% | 25.26691266 |
| 11 | 21 | SEQ ID NO: 9398 | 0.00% | 4.72873208445 |
| 12 | 11 | SEQ ID NO: 9399 | 0.00% | 2.638538265 |
| 13 | 8 | SEQ ID NO: 9400 | 0.00% | 2.4274552038 |
| 14 | 4 | SEQ ID NO: 9401 | 0.00% | 1.7415324 |
| 15 | 20 | SEQ ID NO: 9402 | 0.00% | 1.6025526 |
| 16 | 13 | SEQ ID NO: 9403 | 0.00% | 1.453803297 |
| 17 | 35 | SEQ ID NO: 9404 | 0.00% | 1.36878336 |
| 18 | 3 | SEQ ID NO: 9405 | 0.00% | 0.824619 |
| 19 | 33 | SEQ ID NO: 9406 | 0.00% | 0.513774 |

HLA A 0201 - 10 mers

| Maximum possible score using this molecule type | | | | 3925227.1 |
|---|---|---|---|---|
| 1 | 22 | SEQ ID NO: 9407 | 0.09% | 3636.068421648 |
| 2 | 4 | SEQ ID NO: 9408 | 0.02% | 1107.960876 |
| 3 | 15 | SEQ ID NO: 9409 | 0.02% | 836.2525104 |
| 4 | 16 | SEQ ID NO: 9410 | 0.00% | 150.9313176 |
| 5 | 12 | SEQ ID NO: 9411 | 0.00% | 76.55002416 |
| 6 | 1 | SEQ ID NO: 9412 | 0.00% | 49.0273014 |
| 7 | 10 | SEQ ID NO: 9413 | 0.00% | 42.1638414747 |
| 8 | 20 | SEQ ID NO: 9414 | 0.00% | 9.29480508 |
| 9 | 24 | SEQ ID NO: 9415 | 0.00% | 9.2669346 |
| 10 | 13 | SEQ ID NO: 9416 | 0.00% | 7.96581954 |
| 11 | 21 | SEQ ID NO: 9417 | 0.00% | 5.051306761875 |
| 12 | 5 | SEQ ID NO: 9418 | 0.00% | 2.6941464 |
| 13 | 11 | SEQ ID NO: 9419 | 0.00% | 2.3839914 |
| 14 | 34 | SEQ ID NO: 9420 | 0.00% | 1.465422 |
| 15 | 2 | SEQ ID NO: 9421 | 0.00% | 0.70794 |
| 16 | 9 | SEQ ID NO: 9422 | 0.00% | 0.6513048 |
| 17 | 19 | SEQ ID NO: 9423 | 0.00% | 0.51882640425 |

HLA A 1101 - 10 mers

| | |
|---|---|
| Maximum possible score using this molecule type | 36 |

HLA A 1101 - 10 mers

| Maximum possible score using this molecule type | | | | 36 |
|---|---|---|---|---|
| 1 | 33 | SEQ ID NO: 9424 | 1.66% | 0.6 |

HLA B7 - 9 mers

| Maximum possible score using this molecule type | | | | 5400 |
|---|---|---|---|---|
| 1 | 13 | SEQ ID NO: 9425 | 0.22% | 12 |
| 2 | 2 | SEQ ID NO: 9426 | 0.07% | 4 |
| 3 | 9 | SEQ ID NO: 9427 | 0.07% | 4 |
| 4 | 16 | SEQ ID NO: 9428 | 0.07% | 4 |
| 5 | 23 | SEQ ID NO: 9429 | 0.07% | 4 |
| 6 | 5 | SEQ ID NO: 9430 | 0.02% | 1.2 |
| 7 | 15 | SEQ ID NO: 9431 | 0.01% | 1 |

HLA B7 - 10 mers

| Maximum possible score using this molecule type | | | | 5400 |
|---|---|---|---|---|
| 1 | 4 | SEQ ID NO: 9432 | 0.07% | 4 |
| 2 | 10 | SEQ ID NO: 9433 | 0.07% | 4 |
| 3 | 12 | SEQ ID NO: 9434 | 0.07% | 4 |
| 4 | 15 | SEQ ID NO: 9435 | 0.07% | 4 |
| 5 | 22 | SEQ ID NO: 9436 | 0.07% | 4 |
| 6 | 13 | SEQ ID NO: 9437 | 0.02% | 1.2 |

[1684] TABLE 24
Epitopes for SEQ ID NO: 6050

| | | | | |
|---|---|---|---|---|
| | Start | | % of max. | |
| Rank | position | Sequence | score | Score |

HLA A1 - 9 mers

| Maximum possible score using this molecule type | | | | 5625 |
|---|---|---|---|---|
| 1 | 47 | SEQ ID NO: 9438 | 0.01% | 0.75 |
| 2 | 21 | SEQ ID NO: 9439 | 0.00% | 0.5 |
| 3 | 53 | SEQ ID NO: 9440 | 0.00% | 0.5 |

HLA A1 - 10 mers

| Maximum possible score using this molecule type | | | | 5625 |
|---|---|---|---|---|
| 1 | 16 | SEQ ID NO: 9441 | 0.04% | 2.5 |
| 2 | 71 | SEQ ID NO: 9442 | 0.04% | 2.5 |
| 3 | 47 | SEQ ID NO: 9443 | 0.02% | 1.5 |
| 4 | 62 | SEQ ID NO: 9444 | 0.01% | 0.9 |
| 5 | 20 | SEQ ID NO: 9445 | 0.00% | 0.5 |
| 6 | 38 | SEQ ID NO: 9446 | 0.00% | 0.5 |

HLA A3 - 9 mers

| Maximum possible score using this molecule type | | | | 12150 |
|---|---|---|---|---|
| 1 | 54 | SEQ ID NO: 9447 | 0.02% | 2.7 |
| 2 | 17 | SEQ ID NO: 9448 | 0.01% | 2 |
| 3 | 3 | SEQ ID NO: 9449 | 0.01% | 1.8 |

HLA A3 - 10 mers

| Maximum possible score using this molecule type | | | | 12150 |
|---|---|---|---|---|
| 1 | 22 | SEQ ID NO: 9450 | 0.09% | 12 |
| 2 | 16 | SEQ ID NO: 9451 | 0.01% | 2 |
| 3 | 54 | SEQ ID NO: 9452 | 0.00% | 0.9 |

HLA A24 - 9 mers

| Maximum possible score using this molecule type | | | | 1596.672 |
|---|---|---|---|---|
| 1 | 70 | SEQ ID NO: 9453 | 2.10% | 33.6 |
| 2 | 7 | SEQ ID NO: 9454 | 1.12% | 18 |
| 3 | 60 | SEQ ID NO: 9455 | 0.46% | 7.5 |
| 4 | 54 | SEQ ID NO: 9456 | 0.37% | 6 |
| 5 | 14 | SEQ ID NO: 9457 | 0.31% | 5 |
| 6 | 19 | SEQ ID NO: 9458 | 0.30% | 4.8 |
| 7 | 47 | SEQ ID NO: 9459 | 0.30% | 4.8 |
| 8 | 12 | SEQ ID NO: 9460 | 0.25% | 4 |
| 9 | 15 | SEQ ID NO: 9461 | 0.25% | 4 |
| 10 | 67 | SEQ ID NO: 9462 | 0.25% | 4 |
| 11 | 21 | SEQ ID NO: 9463 | 0.18% | 3 |
| 12 | 37 | SEQ ID NO: 9464 | 0.06% | 1 |
| 13 | 27 | SEQ ID NO: 9465 | 0.03% | 0.5 |

HLA A24 - 10 mers

| Maximum possible score using this molecule type | | | | 1596.672 |
|---|---|---|---|---|
| 1 | 14 | SEQ ID NO: 9466 | 12.52% | 200 |
| 2 | 7 | SEQ ID NO: 9467 | 0.93% | 15 |
| 3 | 11 | SEQ ID NO: 9468 | 0.75% | 12 |
| 4 | 60 | SEQ ID NO: 9469 | 0.56% | 9 |
| 5 | 18 | SEQ ID NO: 9470 | 0.45% | 7.2 |
| 6 | 46 | SEQ ID NO: 9471 | 0.45% | 7.2 |
| 7 | 53 | SEQ ID NO: 9472 | 0.37% | 6 |
| 8 | 69 | SEQ ID NO: 9473 | 0.35% | 5.6 |
| 9 | 66 | SEQ ID NO: 9474 | 0.25% | 4 |
| 10 | 20 | SEQ ID NO: 9475 | 0.12% | 2 |
| 11 | 47 | SEQ ID NO: 9476 | 0.07% | 1.2 |
| 12 | 36 | SEQ ID NO: 9477 | 0.06% | 1 |
| 13 | 26 | SEQ ID NO: 9478 | 0.04% | 0.75 |
| 14 | 70 | SEQ ID NO: 9479 | 0.04% | 0.72 |

HLA A 0201 - 9 mers

| Maximum possible score using this molecule type | | | | 3925227.1 |
|---|---|---|---|---|
| 1 | 54 | SEQ ID NO: 9480 | 0.02% | 881.199 |
| 2 | 26 | SEQ ID NO: 9481 | 0.00% | 95.013 |
| 3 | 61 | SEQ ID NO: 9482 | 0.00% | 93.69648 |
| 4 | 19 | SEQ ID NO: 9483 | 0.00% | 40.2894864 |
| 5 | 74 | SEQ ID NO: 9484 | 0.00% | 12.6684 |
| 6 | 35 | SEQ ID NO: 9485 | 0.00% | 10.34586 |
| 7 | 69 | SEQ ID NO: 9486 | 0.00% | 3.3704706 |
| 8 | 13 | SEQ ID NO: 9487 | 0.00% | 1.656 |
| 9 | 15 | SEQ ID NO: 9488 | 0.00% | 1.47537042 |
| 10 | 68 | SEQ ID NO: 9489 | 0.00% | 0.966 |
| 11 | 22 | SEQ ID NO: 9490 | 0.00% | 0.942678 |
| 12 | 12 | SEQ ID NO: 9491 | 0.00% | 0.7669695 |
| 13 | 36 | SEQ ID NO: 9492 | 0.00% | 0.52661835 |

HLA A 0201 - 10 mers

| Maximum possible score using this molecule type | | | | 3925227.1 |
|---|---|---|---|---|
| 1 | 61 | SEQ ID NO: 9493 | 0.00% | 93.69648 |
| 2 | 25 | SEQ ID NO: 9494 | 0.00% | 63.33035625 |
| 3 | 34 | SEQ ID NO: 9495 | 0.00% | 50.232 |
| 4 | 53 | SEQ ID NO: 9496 | 0.00% | 45.2838375 |
| 5 | 26 | SEQ ID NO: 9497 | 0.00% | 14.35752 |
| 6 | 27 | SEQ ID NO: 9498 | 0.00% | 2.8557858 |
| 7 | 17 | SEQ ID NO: 9499 | 0.00% | 2.3973222 |
| 8 | 36 | SEQ ID NO: 9500 | 0.00% | 1.798209 |
| 9 | 69 | SEQ ID NO: 9501 | 0.00% | 1.03521597 |
| 10 | 67 | SEQ ID NO: 9502 | 0.00% | 0.966 |
| 11 | 68 | SEQ ID NO: 9503 | 0.00% | 0.910938 |
| 12 | 11 | SEQ ID NO: 9504 | 0.00% | 0.7669695 |

HLA A 1101 - 9 mers

| Maximum possible score using this molecule type | | | | 36 |
|---|---|---|---|---|
| 1 | 17 | SEQ ID NO: 9505 | 2.22% | 0.8 |

HLA A 1101 - 10 mers

| Maximum possible score using this molecule type | | | | 36 |
|---|---|---|---|---|
| 1 | 16 | SEQ ID NO: 9506 | 5.55% | 2 |

HLA B7 - 9 mers

| Maximum possible score using this molecule type | | | | 5400 |
|---|---|---|---|---|
| 1 | 27 | SEQ ID NO: 9507 | 0.37% | 20 |
| 2 | 54 | SEQ ID NO: 9508 | 0.22% | 12 |
| 3 | 70 | SEQ ID NO: 9509 | 0.22% | 12 |
| 4 | 67 | SEQ ID NO: 9510 | 0.11% | 6 |
| 5 | 12 | SEQ ID NO: 9511 | 0.07% | 4 |
| 6 | 15 | SEQ ID NO: 9512 | 0.07% | 4 |
| 7 | 19 | SEQ ID NO: 9513 | 0.07% | 4 |
| 8 | 49 | SEQ ID NO: 9514 | 0.03% | 2 |
| 9 | 69 | SEQ ID NO: 9515 | 0.03% | 1.8 |
| 10 | 47 | SEQ ID NO: 9516 | 0.02% | 1.2 |
| 11 | 5 | SEQ ID NO: 9517 | 0.01% | 1 |
| 12 | 9 | SEQ ID NO: 9518 | 0.01% | 1 |
| 13 | 35 | SEQ ID NO: 9519 | 0.01% | 1 |
| 14 | 37 | SEQ ID NO: 9520 | 0.01% | 0.6 |
| 15 | 68 | SEQ ID NO: 9521 | 0.01% | 0.6 |

HLA B7 - 10 mers

| Maximum possible score using this molecule type | | | | 5400 |
|---|---|---|---|---|
| 1 | 69 | SEQ ID NO: 9522 | 0.66% | 36 |
| 2 | 53 | SEQ ID NO: 9523 | 0.22% | 12 |
| 3 | 5 | SEQ ID NO: 9524 | 0.13% | 7.5 |
| 4 | 66 | SEQ ID NO: 9525 | 0.11% | 6 |
| 5 | 11 | SEQ ID NO: 9526 | 0.07% | 4 |
| 6 | 27 | SEQ ID NO: 9527 | 0.07% | 4 |
| 7 | 46 | SEQ ID NO: 9528 | 0.07% | 4 |
| 8 | 18 | SEQ ID NO: 9529 | 0.02% | 1.2 |
| 9 | 9 | SEQ ID NO: 9530 | 0.01% | 1 |
| 10 | 26 | SEQ ID NO: 9531 | 0.01% | 1 |
| 11 | 25 | SEQ ID NO: 9532 | 0.01% | 0.75 |
| 12 | 17 | SEQ ID NO: 9533 | 0.01% | 0.6 |
| 13 | 36 | SEQ ID NO: 9534 | 0.01% | 0.6 |
| 14 | 68 | SEQ ID NO: 9535 | 0.01% | 0.6 |
| 15 | 35 | SEQ ID NO: 9536 | 0.00% | 0.5 |
| 16 | 42 | SEQ ID NO: 9537 | 0.00% | 0.5 |
| 17 | 73 | SEQ ID NO: 9538 | 0.00% | 0.5 |

[1685] TABLE 25
Epitopes for SEQ ID NO: 6052

| | | | | |
|---|---|---|---|---|
| | Start | | % of max. | |
| Rank | position | Sequence | score | Score |

HLA A1 - 9 mers

| Maximum possible score using this molecule type | | | | 5625 |
|---|---|---|---|---|
| 1 | 365 | SEQ ID NO: 9539 | 0.8% | 45 |
| 2 | 397 | SEQ ID NO: 9540 | 0.44% | 25 |
| 3 | 229 | SEQ ID NO: 9541 | 0.32% | 18 |
| 4 | 103 | SEQ ID NO: 9542 | 0.17% | 10 |
| 5 | 338 | SEQ ID NO: 9543 | 0.17% | 10 |
| 6 | 251 | SEQ ID NO: 9544 | 0.16% | 9 |
| 7 | 79 | SEQ ID NO: 9545 | 0.11% | 6.25 |
| 8 | 119 | SEQ ID NO: 9546 | 0.10% | 6 |
| 9 | 361 | SEQ ID NO: 9547 | 0.08% | 5 |
| 10 | 60 | SEQ ID NO: 9548 | 0.04% | 2.25 |
| 11 | 101 | SEQ ID NO: 9549 | 0.04% | 2.25 |
| 12 | 278 | SEQ ID NO: 9550 | 0.04% | 2.25 |
| 13 | 23 | SEQ ID NO: 9551 | 0.02% | 1.25 |
| 14 | 164 | SEQ ID NO: 9552 | 0.02% | 1.25 |
| 15 | 165 | SEQ ID NO: 9553 | 0.02% | 1.25 |
| 16 | 295 | SEQ ID NO: 9554 | 0.02% | 1.25 |
| 17 | 172 | SEQ ID NO: 9555 | 0.01% | 0.9 |
| 18 | 0 | SEQ ID NO: 9556 | 0.01% | 0.75 |
| 19 | 311 | SEQ ID NO: 9557 | 0.01% | 0.75 |
| 20 | 78 | SEQ ID NO: 9558 | 0.01% | 0.625 |

HLA A1 - 10 mers

| Maximum possible score using this molecule type | | | | 5625 |
|---|---|---|---|---|
| 1 | 114 | SEQ ID NO: 9559 | 1.11% | 62.5 |
| 2 | 134 | SEQ ID NO: 9560 | 0.8% | 45 |
| 3 | 365 | SEQ ID NO: 9561 | 0.8% | 45 |
| 4 | 77 | SEQ ID NO: 9562 | 0.66% | 37.5 |
| 5 | 103 | SEQ ID NO: 9563 | 0.44% | 25 |
| 6 | 23 | SEQ ID NO: 9564 | 0.22% | 12.5 |
| 7 | 338 | SEQ ID NO: 9565 | 0.17% | 10 |
| 8 | 361 | SEQ ID NO: 9566 | 0.17% | 10 |
| 9 | 324 | SEQ ID NO: 9567 | 0.11% | 6.25 |
| 10 | 375 | SEQ ID NO: 9568 | 0.11% | 6.25 |
| 11 | 79 | SEQ ID NO: 9569 | 0.04% | 2.5 |
| 12 | 295 | SEQ ID NO: 9570 | 0.04% | 2.5 |
| 13 | 346 | SEQ ID NO: 9571 | 0.04% | 2.5 |
| 14 | 378 | SEQ ID NO: 9572 | 0.03% | 2 |
| 15 | 251 | SEQ ID NO: 9573 | 0.03% | 1.8 |
| 16 | 214 | SEQ ID NO: 9574 | 0.02% | 1.125 |
| 17 | 160 | SEQ ID NO: 9575 | 0.01% | 1 |
| 18 | 172 | SEQ ID NO: 9576 | 0.01% | 0.9 |
| 19 | 229 | SEQ ID NO: 9577 | 0.01% | 0.9 |
| 20 | 376 | SEQ ID NO: 9578 | 0.01% | 0.9 |

HLA A3 - 9 mers

| Maximum possible score using this molecule type | | | | 12150 |
|---|---|---|---|---|
| 1 | 229 | SEQ ID NO: 9579 | 0.49% | 60 |
| 2 | 361 | SEQ ID NO: 9580 | 0.27% | 33.75 |
| 3 | 330 | SEQ ID NO: 9581 | 0.16% | 20 |
| 4 | 218 | SEQ ID NO: 9582 | 0.09% | 12 |
| 5 | 338 | SEQ ID NO: 9583 | 0.04% | 6 |
| 6 | 352 | SEQ ID NO: 9584 | 0.04% | 6 |
| 7 | 103 | SEQ ID NO: 9585 | 0.04% | 5.4 |
| 8 | 291 | SEQ ID NO: 9586 | 0.01% | 2 |
| 9 | 241 | SEQ ID NO: 9587 | 0.01% | 1.8 |
| 10 | 290 | SEQ ID NO: 9588 | 0.01% | 1.8 |
| 11 | 316 | SEQ ID NO: 9589 | 0.01% | 1.8 |
| 12 | 222 | SEQ ID NO: 9590 | 0.01% | 1.35 |
| 13 | 266 | SEQ ID NO: 9591 | 0.01% | 1.35 |
| 14 | 53 | SEQ ID NO: 9592 | 0.00% | 1 |
| 15 | 100 | SEQ ID NO: 9593 | 0.00% | 0.9 |
| 16 | 138 | SEQ ID NO: 9594 | 0.00% | 0.9 |
| 17 | 240 | SEQ ID NO: 9595 | 0.00% | 0.9 |
| 18 | 119 | SEQ ID NO: 9596 | 0.00% | 0.675 |
| 19 | 44 | SEQ ID NO: 9597 | 0.00% | 0.6 |
| 20 | 161 | SEQ ID NO: 9598 | 0.00% | 0.6 |

HLA A3 - 10 mers

| Maximum possible score using this molecule type | | | | 12150 |
|---|---|---|---|---|
| 1 | 338 | SEQ ID NO: 9599 | 0.49% | 60 |
| 2 | 160 | SEQ ID NO: 9600 | 0.32% | 40 |
| 3 | 352 | SEQ ID NO: 9601 | 0.24% | 30 |
| 4 | 361 | SEQ ID NO: 9602 | 0.18% | 22.5 |
| 5 | 103 | SEQ ID NO: 9603 | 0.13% | 16.2 |
| 6 | 290 | SEQ ID NO: 9604 | 0.07% | 9 |
| 7 | 351 | SEQ ID NO: 9605 | 0.07% | 9 |
| 8 | 44 | SEQ ID NO: 9606 | 0.04% | 6 |
| 9 | 228 | SEQ ID NO: 9607 | 0.03% | 4.05 |
| 10 | 394 | SEQ ID NO: 9608 | 0.02% | 3 |
| 11 | 240 | SEQ ID NO: 9609 | 0.02% | 2.7 |
| 12 | 100 | SEQ ID NO: 9610 | 0.01% | 1.8 |
| 13 | 114 | SEQ ID NO: 9611 | 0.01% | 1.8 |
| 14 | 93 | SEQ ID NO: 9612 | 0.01% | 1.5 |
| 15 | 134 | SEQ ID NO: 9613 | 0.01% | 1.5 |
| 16 | 221 | SEQ ID NO: 9614 | 0.01% | 1.35 |
| 17 | 330 | SEQ ID NO: 9615 | 0.00% | 1.2 |
| 18 | 112 | SEQ ID NO: 9616 | 0.00% | 0.9 |
| 19 | 218 | SEQ ID NO: 9617 | 0.00% | 0.9 |
| 20 | 55 | SEQ ID NO: 9618 | 0.00% | 0.6 |

HLA A24 - 9 mers

| Maximum possible score using this molecule type | | | | 1596.672 |
|---|---|---|---|---|
| 1 | 345 | SEQ ID NO: 9619 | 1.50% | 24 |
| 2 | 306 | SEQ ID NO: 9620 | 0.75% | 12 |
| 3 | 222 | SEQ ID NO: 9621 | 0.54% | 8.64 |
| 4 | 111 | SEQ ID NO: 9622 | 0.51% | 8.25 |
| 5 | 159 | SEQ ID NO: 9623 | 0.45% | 7.2 |
| 6 | 219 | SEQ ID NO: 9624 | 0.45% | 7.2 |
| 7 | 283 | SEQ ID NO: 9625 | 0.45% | 7.2 |
| 8 | 266 | SEQ ID NO: 9626 | 0.42% | 6.72 |
| 9 | 56 | SEQ ID NO: 9627 | 0.41% | 6.6 |
| 10 | 131 | SEQ ID NO: 9628 | 0.37% | 6 |
| 11 | 214 | SEQ ID NO: 9629 | 0.37% | 6 |
| 12 | 297 | SEQ ID NO: 9630 | 0.37% | 6 |
| 13 | 86 | SEQ ID NO: 9631 | 0.31% | 5 |
| 14 | 122 | SEQ ID NO: 9632 | 0.31% | 5 |
| 15 | 48 | SEQ ID NO: 9633 | 0.30% | 4.8 |
| 16 | 105 | SEQ ID NO: 9634 | 0.30% | 4.8 |
| 17 | 213 | SEQ ID NO: 9635 | 0.30% | 4.8 |
| 18 | 323 | SEQ ID NO: 9636 | 0.30% | 4.8 |
| 19 | 338 | SEQ ID NO: 9637 | 0.30% | 4.8 |
| 20 | 399 | SEQ ID NO: 9638 | 0.30% | 4.8 |

HLA A24 - 10 mers

| Maximum possible score using this molecule type | | | | 1596.672 |
|---|---|---|---|---|
| 1 | 65 | SEQ ID NO: 9639 | 0.93% | 15 |
| 2 | 306 | SEQ ID NO: 9640 | 0.75% | 12 |
| 3 | 95 | SEQ ID NO: 9641 | 0.66% | 10.56 |
| 4 | 36 | SEQ ID NO: 9642 | 0.60% | 9.6 |
| 5 | 385 | SEQ ID NO: 9643 | 0.50% | 8 |
| 6 | 111 | SEQ ID NO: 9644 | 0.46% | 7.5 |
| 7 | 104 | SEQ ID NO: 9645 | 0.45% | 7.2 |
| 8 | 214 | SEQ ID NO: 9646 | 0.45% | 7.2 |
| 9 | 221 | SEQ ID NO: 9647 | 0.45% | 7.2 |
| 10 | 277 | SEQ ID NO: 9648 | 0.45% | 7.2 |
| 11 | 150 | SEQ ID NO: 9649 | 0.37% | 6 |
| 12 | 152 | SEQ ID NO: 9650 | 0.37% | 6 |
| 13 | 158 | SEQ ID NO: 9651 | 0.37% | 6 |
| 14 | 171 | SEQ ID NO: 9652 | 0.37% | 6 |
| 15 | 343 | SEQ ID NO: 9653 | 037% | 6 |
| 16 | 110 | SEQ ID NO: 9654 | 0.34% | 5.5 |
| 17 | 85 | SEQ ID NO: 9655 | 0.31% | 5 |
| 18 | 47 | SEQ ID NO: 9656 | 0.30% | 4.8 |
| 19 | 213 | SEQ ID NO: 9657 | 0.30% | 4.8 |
| 20 | 218 | SEQ ID NO: 9658 | 0.30% | 4.8 |

HLA A 0201 - 9 mers

| Maximum possible score using this molecule type | | | | 3925227.1 |
|---|---|---|---|---|
| 1 | 222 | SEQ ID NO: 9659 | 0.03% | 1267.10434728 |
| 2 | 226 | SEQ ID NO: 9660 | 0.00% | 69.552 |
| 3 | 316 | SEQ ID NO: 9661 | 0.00% | 50.232 |
| 4 | 351 | SEQ ID NO: 9662 | 0.00% | 31.24872 |
| 5 | 159 | SEQ ID NO: 9663 | 0.00% | 13.6235739 |
| 6 | 406 | SEQ ID NO: 9664 | 0.00% | 11.4264 |
| 7 | 165 | SEQ ID NO: 9665 | 0.00% | 8.14407 |
| 8 | 238 | SEQ ID NO: 9666 | 0.00% | 7.0518 |
| 9 | 138 | SEQ ID NO: 9667 | 0.00% | 5.112072 |
| 10 | 130 | SEQ ID NO: 9668 | 0.00% | 3.00547233 |
| 11 | 303 | SEQ ID NO: 9669 | 0.00% | 2.59578 |
| 12 | 157 | SEQ ID NO: 9670 | 0.00% | 2.412585 |
| 13 | 219 | SEQ ID NO: 9671 | 0.00% | 2.103255861 |
| 14 | 305 | SEQ ID NO: 9672 | 0.00% | 1.86369 |
| 15 | 158 | SEQ ID NO: 9673 | 0.00% | 1.646892 |
| 16 | 331 | SEQ ID NO: 9674 | 0.00% | 1.614048 |
| 17 | 399 | SEQ ID NO: 9675 | 0.00% | 1.442246832 |
| 18 | 324 | SEQ ID NO: 9676 | 0.00% | 1.319625 |
| 19 | 312 | SEQ ID NO: 9677 | 0.00% | 1.233099 |
| 20 | 262 | SEQ ID NO: 9678 | 0.00% | 0.966 |

HLA A 0201 - 10 mers

| Maximum possible score using this molecule type | | | | 3925227.1 |
|---|---|---|---|---|
| 1 | 221 | SEQ ID NO: 9679 | 0.00% | 309.0498408 |
| 2 | 112 | SEQ ID NO: 9680 | 0.00% | 98.26704 |
| 3 | 330 | SEQ ID NO: 9681 | 0.00% | 98.26704 |
| 4 | 158 | SEQ ID NO: 9682 | 0.00% | 36.31608 |
| 5 | 218 | SEQ ID NO: 9683 | 0.00% | 24.0754248 |
| 6 | 124 | SEQ ID NO: 9684 | 0.00% | 12.2199 |
| 7 | 55 | SEQ ID NO: 9685 | 0.00% | 10.467576 |
| 8 | 315 | SEQ ID NO: 9686 | 0.00% | 7.7274204 |
| 9 | 350 | SEQ ID NO: 9687 | 0.00% | 4.296699 |
| 10 | 405 | SEQ ID NO: 9688 | 0.00% | 4.286487 |
| 11 | 388 | SEQ ID NO: 9689 | 0.00% | 4.054785 |
| 12 | 322 | SEQ ID NO: 9690 | 0.00% | 3.883803 |
| 13 | 130 | SEQ ID NO: 9691 | 0.00% | 3.428691903 |
| 14 | 45 | SEQ ID NO: 9692 | 0.00% | 3.411230625 |
| 15 | 132 | SEQ ID NO: 9693 | 0.00% | 2.99943 |
| 16 | 410 | SEQ ID NO: 9694 | 0.00% | 2.63718 |
| 17 | 316 | SEQ ID NO: 9695 | 0.00% | 2.48686074 |
| 18 | 104 | SEQ ID NO: 9696 | 0.00% | 2.477311485 |
| 19 | 164 | SEQ ID NO: 9697 | 0.00% | 2.2011 |
| 20 | 282 | SEQ ID NO: 9698 | 0.00% | 2.16591 |

HLA A 1101 - 9 mers

| Maximum possible score using this molecule type | | | | 36 |
|---|---|---|---|---|
| 1 | 361 | SEQ ID NO: 9699 | 16.66% | 6 |
| 2 | 53 | SEQ ID NO: 9700 | 2.77% | 1 |
| 3 | 240 | SEQ ID NO: 9701 | 1.66% | 0.6 |
| 4 | 241 | SEQ ID NO: 9702 | 1.66% | 0.6 |

HLA A 1101 - 10 mers

| Maximum possible score using this molecule type | | | | 36 |
|---|---|---|---|---|
| 1 | 361 | SEQ ID NO: 9703 | 16.66% | 6 |
| 2 | 93 | SEQ ID NO: 9704 | 8.33% | 3 |
| 3 | 338 | SEQ ID NO: 9705 | 3.33% | 1.2 |
| 4 | 134 | SEQ ID NO: 9706 | 2.77% | 1 |
| 5 | 228 | SEQ ID NO: 9707 | 2.5% | 0.9 |
| 6 | 160 | SEQ ID NO: 9708 | 2.22% | 0.8 |
| 7 | 239 | SEQ ID NO: 9709 | 1.66% | 0.6 |
| 8 | 240 | SEQ ID NO: 9710 | 1.66% | 0.6 |
| 9 | 257 | SEQ ID NO: 9711 | 1.66% | 0.6 |
| 10 | 379 | SEQ ID NO: 9712 | 1.66% | 0.6 |

HLA B7 - 9 mers

| Maximum possible score using this molecule type | | | | 5400 |
|---|---|---|---|---|
| 1 | 105 | SEQ ID NO: 9713 | 14.81% | 800 |
| 2 | 66 | SEQ ID NO: 9714 | 1.48% | 80 |
| 3 | 93 | SEQ ID NO: 9715 | 0.92% | 50 |
| 4 | 257 | SEQ ID NO: 9716 | 0.55% | 30 |
| 5 | 323 | SEQ ID NO: 9717 | 0.37% | 20 |
| 6 | 211 | SEQ ID NO: 9718 | 0.22% | 12 |
| 7 | 219 | SEQ ID NO: 9719 | 0.22% | 12 |
| 8 | 403 | SEQ ID NO: 9720 | 0.18% | 10 |
| 9 | 343 | SEQ ID NO: 9721 | 0.14% | 8 |
| 10 | 12 | SEQ ID NO: 9722 | 0.11% | 6 |
| 11 | 113 | SEQ ID NO: 9723 | 0.11% | 6 |
| 12 | 48 | SEQ ID NO: 9724 | 0.07% | 4 |
| 13 | 56 | SEQ ID NO: 9725 | 0.07% | 4 |
| 14 | 150 | SEQ ID NO: 9726 | 0.07% | 4 |
| 15 | 153 | SEQ ID NO: 9727 | 0.07% | 4 |
| 16 | 159 | SEQ ID NO: 9728 | 0.07% | 4 |
| 17 | 213 | SEQ ID NO: 9729 | 0.07% | 4 |
| 18 | 216 | SEQ ID NO: 9730 | 0.07% | 4 |
| 19 | 222 | SEQ ID NO: 9731 | 0.07% | 4 |
| 20 | 283 | SEQ ID NO: 9732 | 0.07% | 4 |

HLA B7 - 10 mers

| Maximum possible score using this molecule type | | | | 5400 |
|---|---|---|---|---|
| 1 | 36 | SEQ ID NO: 9733 | 1.48% | 80 |
| 2 | 150 | SEQ ID NO: 9734 | 1.48% | 80 |
| 3 | 343 | SEQ ID NO: 9735 | 1.48% | 80 |
| 4 | 12 | SEQ ID NO: 9736 | 1.11% | 60 |
| 5 | 308 | SEQ ID NO: 9737 | 1.11% | 60 |
| 6 | 130 | SEQ ID NO: 9738 | 0.37% | 20 |
| 7 | 55 | SEQ ID NO: 9739 | 0.22% | 12 |
| 8 | 210 | SEQ ID NO: 9740 | 0.22% | 12 |
| 9 | 218 | SEQ ID NO: 9741 | 0.22% | 12 |
| 10 | 201 | SEQ ID NO: 9742 | 0.18% | 10 |
| 11 | 121 | SEQ ID NO: 9743 | 0.14% | 8 |
| 12 | 391 | SEQ ID NO: 9744 | 0.13% | 7.5 |
| 13 | 112 | SEQ ID NO: 9745 | 0.11% | 6 |
| 14 | 385 | SEQ ID NO: 9746 | 0.11% | 6 |
| 15 | 47 | SEQ ID NO: 9747 | 0.07% | 4 |
| 16 | 66 | SEQ ID NO: 9748 | 0.07% | 4 |
| 17 | 95 | SEQ ID NO: 9749 | 0.07% | 4 |
| 18 | 104 | SEQ ID NO: 9750 | 0.07% | 4 |
| 19 | 152 | SEQ ID NO: 9751 | 0.07% | 4 |
| 20 | 158 | SEQ ID NO: 9752 | 0.07% | 4 |

[1686] TABLE 26
Cloned sequences for E. coli expression

| | |
|---|---|
| DNA length | Cloning |

| ORF | bp | pET | pGEX |
|---|---|---|---|
| P28 | 537 | NdeI/XhoI | |
| P65 | 1917 | NheI/HindIII | |
| Nsp1A | 2495 | NheI/XhoI | |
| Nsp1B | 2153 | NdeI/XhoI | |
| Nsp1C | 2612 | NdeI/XhoI | |
| Nsp2A | 431 | NdeI/XhoI | BamHI/XhoI |
| Nsp2B | 426 | NdeI/XhoI | BamHI/XhoI |
| Nsp3 | 870 | NdeI/XhoI | |
| Nsp4 | 249 | NdeI/XhoI | BamHI/XhoI |
| Nsp5 | 594 | NheI/XhoI | |
| Nsp6 | 339 | NdeI/XhoI | BamHI/XhoI |
| Nsp7 | 417 | NdeI/XhoI | BamHI/XhoI |
| Nsp9A | 1385 | NheI/XhoI | |
| Nsp9B | 1409 | NdeI/XhoI | |
| Nsp10 | 1803 | NheI/XhoI | |
| Nsp11 | 1581 | NdeI/XhoI | |
| Nsp12 | 1038 | NdeI/HindIII | |
| Nsp13 | 897 | NdeI/XhoI | |
| Spike (S1) | 1946 | NdeI/XhoI | |
| Spike (S2) | 1598 | NdeI/XhoI | |
| Spike (S1-S2) | 3545 | NdeI/XhoI | |
| HR1 | 287 | NdeI/XhoI | BamHI/XhoI |
| HR2 | 146 | NdeI/XhoI | BamHI/XhoI |
| ORF3Δ100 | 525 | NdeI/XhoI | |
| ORF4 | 465 | NdeI/XhoI | |
| Envelope (E) | 231 | NdeI/XhoI | BamHI/XhoI |
| Matrix (M)Δ100 | 366 | NdeI/XhoI | BamHI/XhoI |
| ORF7Δ18 | 137 | NdeI/XhoI | BamHI/XhoI |
| ORF8 | 369 | NdeI/XhoI | BamHI/XhoI |
| ORF9 | 135 | NdeI/XhoI | BamHI/XhoI |
| ORF10 | 120 | NheI/XhoI | BamHI/XhoI |
| ORF11 | 255 | NdeI/XhoI | BamHI/XhoI |
| Nucleocapsid (N) | 1269 | NdeI/EcoRI | |
| ORF12 | 297 | NdeI/EcoRI | BamHI/EcoRI |

[1687] TABLE 27
Primers

| ORF | Forward primer | Reverse primer |
|---|---|---|
| P28 | 9803 | 9818 |
| P65 | 9804 | 9819 |
| Nsp1A | 9805 | 9820 |
| Nsp1B | 9806 | 9821 |
| Nsp1C | 9807 | 9822 |
| Nsp2 + Nsp3 | 9808 | 9823 |
| Nsp4 to Nsp7 | 9809 | 9824 |
| Nsp9A | 9810 | 9825 |
| Nsp9B | 9811 | 9826 |
| Nsp10 | 9812 | 9827 |
| Nsp11 | 9813 | 9828 |
| Nsp12-Nsp13 | 9814 | 9829 |
| ORF3-ORF4 | 9815 | 9830 |
| Env-ORF10 | 9816 | 9831 |
| ORF11-ORF12 | 9817 | 9832 |

[1688] TABLE 28
Primers

| ORF | Forward primer | Reverse primer |
|---|---|---|
| Nsp2A | SEQ ID NO: 9833 | SEQ ID NO: 9858 |
| Nsp2B | SEQ ID NO: 9834 | SEQ ID NO: 9859 |
| Nsp3 | SEQ ID NO: 9835 | SEQ ID NO: 9860 |
| Nsp4 | SEQ ID NO: 9836 | SEQ ID NO: 9861 |
| Nsp5 | SEQ ID NO: 9837 | SEQ ID NO: 9862 |
| Nsp6 | SEQ ID NO: 9838 | SEQ ID NO: 9863 |
| Nsp7 | SEQ ID NO: 9839 | SEQ ID NO: 9864 |
| Nsp12 | SEQ ID NO: 9840 | SEQ ID NO: 9865 |
| Nsp13 | SEQ ID NO: 9841 | SEQ ID NO: 9866 |
| Spike S1 | SEQ ID NO: 9842 | SEQ ID NO: 9867 |
| Spike S2 | SEQ ID NO: 9843 | SEQ ID NO: 9868 |
| Spike S1-S2 | SEQ ID NO: 9844 | SEQ ID NO: 9869 |
| HR1 | SEQ ID NO: 9845 | SEQ ID NO: 9870 |
| HR2 | SEQ ID NO: 9846 | SEQ ID NO: 9871 |
| Orf3Δ100 | SEQ ID NO: 9847 | SEQ ID NO: 9872 |
| Orf4 | SEQ ID NO: 9848 | SEQ ID NO: 9873 |
| Env E | SEQ ID NO: 9849 | SEQ ID NO: 9874 |
| Matrix MΔ100 | SEQ ID NO: 9850 | SEQ ID NO: 9875 |
| Orf7Δ18 | SEQ ID NO: 9851 | SEQ ID NO: 9876 |
| Orf8 | SEQ ID NO: 9852 | SEQ ID NO: 9877 |
| Orf9 | SEQ ID NO: 9853 | SEQ ID NO: 9878 |
| Orf10 | SEQ ID NO: 9854 | SEQ ID NO: 9879 |
| Orf11 | SEQ ID NO: 9855 | SEQ ID NO: 9880 |
| Nucleocapsid N | SEQ ID NO: 9856 | SEQ ID NO: 9881 |
| Orf12 | SEQ ID NO: 9857 | SEQ ID NO: 9882 |

[1689] TABLE 29
Cloning, purification and expression in E. coli

| | M.W | | | |
|---|---|---|---|---|
| SARS CoV ORFs | Kd | cloning | Expr. | purification as |
| P28 | 19.7 | + | + | his sol |
| P65 | 70.3 | + | + | his sol |
| Nsp1A (N-term) | 91.6 | + | + | his sol |
| Nsp1B (core) | 80.8 | + | − | |
| Nsp1C (C-term) | 95.3 | + | − | |
| Nsp2A (N-term) | 15.8 | + | + | his ins |
| Nsp2B (C-term) | 15.5 | + | + | his sol |
| Nsp3 | 31.9 | + | − | |
| Nsp4 | 9.1 | + | + | his sol |
| Nsp5 | 21.8 | + | + | his sol |
| Nsp6 | 12.4 | + | + | his sol |
| Nsp7 | 15.3 | + | + | his ins |
| Nsp9A (N-term) | 50.8 | + | − | |
| Nsp9B (C-term) | 51.6 | + | + | his ins |
| Nsp10 | 66 | − | | |
| Nsp11 | 58 | − | | |
| Nsp12 | 38 | − | | |
| Nsp13 | 32.7 | + | + | his ins |
| Spike (S1-his) | 71.3 | + | + | his ins |
| Spike (S2-his) | 58.6 | + | − | |
| Spike (S1S2-his) | 130 | + | + | his ins |
| HR1 | 11 | + | + | his ins |
| HR2 | 5.4 | + | + | his sol |
| ORF3 Δ100¹ | 19.1 | + | − | |
| ORF4 | 16.9 | + | + | his ins (trimer) |
| Envelope (E) | 34.3 | + | + | gst ins (IB) |
| Matrix (M) Δ100 | 13.3 | + | + | his ins |
| ORF7Δ18² | 31 | + | + | gst sol |
| ORF8 | 39.5 | + | + | gst ins (IB) |
| ORF9 | 30.8 | + | + | gst sol |
| ORF10 | 30.3 | + | + | gst ins (IB) |
| ORF11 | 35.2 | + | + | gst ins (IB) |
| Nucleocapsid (N) | 43.6 | + | + | his ins |
| ORF12 | 36.7 | + | + | his ins |

[1690] TABLE 30
E. coli expression, purity and yield

| Protein | Tag | Purity (%) | Yield (mg/l) |
|---|---|---|---|
| Nsp2A (N-term) | His | 95 | 1.7 |
| Nsp2B (C-term) | His | 95 | 4.1 |
| Nsp4 | His | 95 | 12.6 |
| Nsp5 | His | 95 | 5.88 |
| Nsp6 | His | 95 | 8.1 |
| P28 | His | 95 | 1 |
| P65 | His | 80 | 0.553 |
| HR2 | His | 95 | 11.9 |
| HR1 | His | 80 | 2.64 |
| Nsp1A | His | 95 | 0.267 |
| Spike S1-S2 | His | 80 | 0.381 |
| Matrix M | His | 85 | 12.4 |
| ORF7 | GST | 85 | 4.9 |

[1691] TABLE 31
Primers

| | | | | |
|---|---|---|---|---|
| SEQ ID NO: | Rank | Model | Local | (Position) |

| | | | | |
|---|---|---|---|---|
| 10235 | F1 | 1 | 1 | (106) |
| 10236 | F2 | 2 | 1 | (728) |
| 10237 | F3 | 3 | 1 | (112) |
| 10238 | F4 | 5 | 2 | (1331) |
| 10239 | F5 | 6 | 1 | (12) |
| 10240 | F6 | 6 | 1 | (346) |
| 10241 | F7 | 8 | 1 | (904) |
| 10242 | F8 | 9 | 1 | (1016) |
| 10243 | F9 | 9 | 1 | (1015) |
| 10244 | F10 | 9 | 1 | (719) |
| 10245 | F11 | 9 | 1 | (720) |
| 10246 | F12 | 10 | 1 | (724) |
| 10247 | R1 | 2 | 1 | (1283) |
| 10248 | R2 | 4 | 1 | (756) |
| 10249 | R3 | 4 | 1 | (758) |
| 10250 | R4 | 5 | 2 | (259) |
| 10251 | R5 | 6 | 1 | (54) |
| 10252 | R6 | 7 | 1 | (648) |
| 10253 | R7 | 8 | 1 | (948) |
| 10254 | R8 | 8 | 1 | (260) |
| 10255 | R9 | 9 | 1 | (1282) |
| 10256 | R10 | 9 | 1 | (950) |
| 10257 | R11 | 9 | 1 | (756) |
| 10258 | R12 | 10 | 1 | (132) |

[1692] TABLE 32
Primers

| | Scores | | | |
|---|---|---|---|---|
| Rank | Model | Local | Sequence | (Position) |

Primers List: (forward)

| | | | | |
|---|---|---|---|---|
| F1 | 7 | 1 | SEQ ID NO: 10352 | (290) |
| F2 | 7 | 1 | SEQ ID NO: 10353 | (291) |
| F3 | 7 | 1 | SEQ ID NO: 10354 | (294) |
| F4 | 7 | 1 | SEQ ID NO: 10355 | (292) |
| F5 | 7 | 1 | SEQ ID NO: 10356 | (293) |
| F6 | 9 | 1 | SEQ ID NO: 10357 | (198) |
| F7 | 9 | 1 | SEQ ID NO: 10358 | (199) |
| F8 | 10 | 1 | SEQ ID NO: 10359 | (33) |
| F9 | 11 | 1 | SEQ ID NO: 10360 | (200) |
| F10 | 11 | 1 | SEQ ID NO: 10361 | (299) |
| F11 | 12 | 1 | SEQ ID NO: 10362 | (298) |
| F12 | 12 | 1 | SEQ ID NO: 10363 | (297) |
| F13 | 14 | 1 | SEQ ID NO: 10364 | (35) |
| F14 | 14 | 1 | SEQ ID NO: 10365 | (34) |
| F15 | 16 | 1 | SEQ ID NO: 10366 | (300) |
| F16 | 17 | 1 | SEQ ID NO: 10367 | (295) |
| F17 | 17 | 1 | SEQ ID NO: 10368 | (296) |
| F18 | 17 | 1 | SEQ ID NO: 10369 | (175) |
| F19 | 17 | 1 | SEQ ID NO: 10370 | (36) |
| F20 | 20 | 1 | SEQ ID NO: 10371 | (202) |
| F21 | 20 | 1 | SEQ ID NO: 10372 | (201) |
| F22 | 28 | 1 | SEQ ID NO: 10373 | (204) |
| F23 | 28 | 1 | SEQ ID NO: 10374 | (203) |
| F24 | 29 | 1 | SEQ ID NO: 10375 | (269) |
| F25 | 29 | 1 | SEQ ID NO: 10376 | (268) |

Primers List: (reverse)

| | | | | |
|---|---|---|---|---|
| R1 | 7 | 1 | SEQ ID NO: 10377 | (337) |
| R2 | 9 | 1 | SEQ ID NO: 10378 | (229) |
| R3 | 11 | 1 | SEQ ID NO: 10379 | (230) |
| R4 | 11 | 1 | SEQ ID NO: 10380 | (338) |
| R5 | 12 | 1 | SEQ ID NO: 10381 | (207) |
| R6 | 12 | 1 | SEQ ID NO: 10382 | (338) |
| R7 | 13 | 1 | SEQ ID NO: 10383 | (231) |
| R8 | 14 | 1 | SEQ ID NO: 10384 | (80) |
| R9 | 14 | 1 | SEQ ID NO: 10385 | (232) |
| R10 | 15 | 1 | SEQ ID NO: 10386 | (82) |
| R11 | 16 | 1 | SEQ ID NO: 10387 | (340) |
| R12 | 17 | 1 | SEQ ID NO: 10388 | (83) |
| R13 | 17 | 1 | SEQ ID NO: 10389 | (206) |
| R14 | 17 | 1 | SEQ ID NO: 10390 | (82) |
| R15 | 17 | 1 | SEQ ID NO: 10391 | (337) |
| R16 | 18 | 1 | SEQ ID NO: 10392 | (341) |
| R17 | 20 | 1 | SEQ ID NO: 10393 | (340) |
| R18 | 20 | 1 | SEQ ID NO: 10394 | (233) |
| R19 | 21 | 1 | SEQ ID NO: 10395 | (79) |
| R20 | 22 | 1 | SEQ ID NO: 10396 | (213) |
| R21 | 28 | 1 | SEQ ID NO: 10397 | (236) |
| R22 | 29 | 1 | SEQ ID NO: 10398 | (317) |
| R23 | 32 | 1 | SEQ ID NO: 10399 | (391) |
| R24 | 35 | 1 | SEQ ID NO: 10400 | (57) |
| R25 | 36 | 1 | SEQ ID NO: 10401 | (237) |

Primers List (left part): SEQ ID NO^{S}: 10402-10433
Primers List (right part): SEQ ID NO^{S}: 10434-10464
Primers List (forward): SEQ ID NO^{S}: 10465-10484
Primers List (reverse): SEQ ID NO^{S}: 10485-10504

[1693] TABLE 33
Primers

| | Scores | | | |
|---|---|---|---|---|
| Rank | Model | Local | Sequence | (Position) |

Primers List: (forward)

| | | | | |
|---|---|---|---|---|
| F1 | 1 | 1 | SEQ ID NO: 10580 | (637) |
| F2 | 2 | 1 | SEQ ID NO: 10581 | (439) |
| F3 | 2 | 1 | SEQ ID NO: 10582 | (440) |
| F4 | 3 | 1 | SEQ ID NO: 10583 | (729) |
| F5 | 4 | 1 | SEQ ID NO: 10584 | (696) |
| F6 | 4 | 1 | SEQ ID NO: 10585 | (697) |
| F7 | 4 | 1 | SEQ ID NO: 10586 | (111) |
| F8 | 5 | 1 | SEQ ID NO: 10587 | (867) |
| F9 | 5 | 1 | SEQ ID NO: 10588 | (868) |
| F10 | 5 | 1 | SEQ ID NO: 10589 | (869) |
| F11 | 5 | 1 | SEQ ID NO: 10590 | (640) |
| F12 | 6 | 1 | SEQ ID NO: 10591 | (438) |
| F13 | 6 | 1 | SEQ ID NO: 10592 | (437) |
| F14 | 6 | 1 | SEQ ID NO: 10593 | (436) |
| F15 | 6 | 1 | SEQ ID NO: 10594 | (732) |
| F16 | 6 | 1 | SEQ ID NO: 10595 | (635) |
| F17 | 6 | 1 | SEQ ID NO: 10596 | (457) |
| F18 | 6 | 1 | SEQ ID NO: 10597 | (458) |
| F19 | 6 | 1 | SEQ ID NO: 10598 | (636) |
| F20 | 7 | 1 | SEQ ID NO: 10599 | (854) |
| F21 | 7 | 1 | SEQ ID NO: 10600 | (855) |
| F22 | 7 | 1 | SEQ ID NO: 10601 | (581) |
| F23 | 7 | 1 | SEQ ID NO: 10602 | (853) |
| F24 | 7 | 1 | SEQ ID NO: 10603 | (342) |
| F25 | 7 | 1 | SEQ ID NO: 10604 | (343) |
| F26 | 7 | 1 | SEQ ID NO: 10605 | (112) |
| F27 | 7 | 1 | SEQ ID NO: 10606 | (94) |
| F28 | 7 | 1 | SEQ ID NO: 10607 | (642) |
| F29 | 8 | 1 | SEQ ID NO: 10608 | (638) |
| F30 | 8 | 1 | SEQ ID NO: 10609 | (639) |
| F31 | 8 | 1 | SEQ ID NO: 10610 | (730) |
| F32 | 8 | 1 | SEQ ID NO: 10611 | (641) |
| F33 | 8 | 1 | SEQ ID NO: 10612 | (731) |
| F34 | 8 | 1 | SEQ ID NO: 10613 | (326) |
| F35 | 8 | 1 | SEQ ID NO: 10614 | (325) |
| F36 | 9 | 1 | SEQ ID NO: 10615 | (517) |
| F37 | 9 | 1 | SEQ ID NO: 10616 | (701) |
| F38 | 9 | 1 | SEQ ID NO: 10617 | (208) |
| F39 | 9 | 1 | SEQ ID NO: 10618 | (209) |
| F40 | 9 | 1 | SEQ ID NO: 10619 | (702) |
| F41 | 9 | 1 | SEQ ID NO: 10620 | (210) |
| F42 | 10 | 1 | SEQ ID NO: 10621 | (634) |
| F43 | 10 | 1 | SEQ ID NO: 10622 | (694) |
| F44 | 10 | 1 | SEQ ID NO: 10623 | (693) |
| F45 | 10 | 1 | SEQ ID NO: 10624 | (728) |
| F46 | 10 | 1 | SEQ ID NO: 10625 | (695) |
| F47 | 10 | 1 | SEQ ID NO: 10626 | (95) |
| F48 | 11 | 1 | SEQ ID NO: 10627 | (455) |
| F49 | 11 | 1 | SEQ ID NO: 10628 | (456) |
| F50 | 11 | 1 | SEQ ID NO: 10629 | (454) |

Primers List: (reverse)

| | | | | |
|---|---|---|---|---|
| R1 | 1 | 1 | SEQ ID NO: 10630 | (367) |
| R2 | 1 | 1 | SEQ ID NO: 10631 | (666) |
| R3 | 2 | 1 | SEQ ID NO: 10632 | (464) |
| R4 | 3 | 1 | SEQ ID NO: 10633 | (669) |
| R5 | 3 | 1 | SEQ ID NO: 10634 | (750) |
| R6 | 4 | 1 | SEQ ID NO: 10635 | (720) |
| R7 | 4 | 1 | SEQ ID NO: 10636 | (465) |
| R8 | 4 | 1 | SEQ ID NO: 10637 | (370) |
| R9 | 4 | 1 | SEQ ID NO: 10638 | (668) |
| R10 | 4 | 1 | SEQ ID NO: 10639 | (135) |
| R11 | 5 | 1 | SEQ ID NO: 10640 | (901) |
| R12 | 5 | 1 | SEQ ID NO: 10641 | (667) |
| R13 | 6 | 1 | SEQ ID NO: 10642 | (609) |
| R14 | 6 | 1 | SEQ ID NO: 10643 | (464) |
| R15 | 6 | 1 | SEQ ID NO: 10644 | (665) |
| R16 | 6 | 1 | SEQ ID NO: 10645 | (486) |
| R17 | 6 | 1 | SEQ ID NO: 10646 | (356) |
| R18 | 6 | 1 | SEQ ID NO: 10647 | (758) |
| R19 | 7 | 1 | SEQ ID NO: 10648 | (366) |
| R20 | 7 | 1 | SEQ ID NO: 10649 | (368) |
| R21 | 7 | 1 | SEQ ID NO: 10650 | (136) |
| R22 | 7 | 1 | SEQ ID NO: 10651 | (675) |
| R23 | 7 | 1 | SEQ ID NO: 10652 | (366) |
| R24 | 7 | 1 | SEQ ID NO: 10653 | (608) |
| R25 | 7 | 1 | SEQ ID NO: 10654 | (884) |
| R26 | 7 | 1 | SEQ ID NO: 10655 | (120) |
| R27 | 8 | 1 | SEQ ID NO: 10656 | (355) |
| R28 | 8 | 1 | SEQ ID NO: 10657 | (671) |
| R29 | 8 | 1 | SEQ ID NO: 10658 | (756) |
| R30 | 8 | 1 | SEQ ID NO: 10659 | (751) |
| R31 | 8 | 1 | SEQ ID NO: 10660 | (666) |
| R32 | 9 | 1 | SEQ ID NO: 10661 | (242) |
| R33 | 9 | 1 | SEQ ID NO: 10662 | (543) |
| R34 | 9 | 1 | SEQ ID NO: 10663 | (724) |
| R35 | 9 | 1 | SEQ ID NO: 10664 | (482) |
| R36 | 10 | 1 | SEQ ID NO: 10665 | (121) |
| R37 | 10 | 1 | SEQ ID NO: 10666 | (662) |
| R38 | 10 | 1 | SEQ ID NO: 10667 | (750) |
| R39 | 10 | 1 | SEQ ID NO: 10668 | (719) |
| R40 | 10 | 1 | SEQ ID NO: 10669 | (242) |
| R41 | 11 | 1 | SEQ ID NO: 10670 | (484) |
| R42 | 11 | 1 | SEQ ID NO: 10671 | (375) |
| R43 | 11 | 1 | SEQ ID NO: 10672 | (728) |
| R44 | 11 | 1 | SEQ ID NO: 10673 | (373) |
| R45 | 11 | 1 | SEQ ID NO: 10674 | (998) |
| R46 | 11 | 1 | SEQ ID NO: 10675 | (486) |
| R47 | 12 | 1 | SEQ ID NO: 10676 | (881) |
| R48 | 12 | 1 | SEQ ID NO: 10677 | (882) |
| R49 | 12 | 1 | SEQ ID NO: 10678 | (244) |
| R50 | 12 | 1 | SEQ ID NO: 10679 | (1003) |

Primers List (left part): SEQ ID NO^{S}: 10680-10974
Primers List (right part): SEQ ID NO^{S}: 10975-11282
Primers List (forward): SEQ ID NO^{S}: 11283-11302
Primers List (reverse): SEQ ID NO^{S}: 11303-11322

[1694] TABLE 34

| Compound | | | |
|---|---|---|---|
| # | Structure | Name | MH+ |
| 1 | [chemical structure] | N-methyl-4-[(2-{[2-(1- methylethyl)phenyl]amino}-1H- benzimidazol-5-yl)oxy]pyridine- 2-carboxamide | 402.5 |
| 2 | [chemical structure] | N-methyl-4-{[1-methyl-2-({3- [(trimethylsilyl)ethynyl]phenyl}amino)-1H-benzimidazol-5- yl]oxy}pyridine-2-carboxamide | 470.6 |
| 3 | [chemical structure] | N-methyl-4-[(1-methyl-2-{[2- (phenylcarbonyl)phenyl]amino}- 1H-benzimidazol-5- yl)oxy]pyridine-2-carboxamide | 478.5 |
| 4 | [chemical structure] | 4-(methyloxy)-N-[6- (methyloxy)-1,3-benzothiazol-2- yl]-3-nitrobenzamide | 360.4 |
| 5 | [chemical structure] | 4-({2-[(4-butylphenyl)amino]- 1,3-benzothiazol-5-yl}oxy)-N- methylpyridine-2-carboxamide | 433.5 |
| 6 | [chemical structure] | N-methyl-4-({1-methyl-2-[(6- pyrrolidin-1-ylpyridin-3-yl) amino]-1H-benzimidazol-5- yl}oxy)pyridine-2-carboxamide | 444.5 |
| 7 | [chemical structure] | 4-({2-[1,1′-bi(cyclohexyl)-2- ylamino]-1-methyl-1H- benzimidazol-5-yl}oxy)-N- methylpyridine-2-carboxamide | 462.6 |
| 8 | [chemical structure] | 4-({2-[(4-chlorophenyl)amino]- 1-methyl-1H-benzimidazol-5- yl}oxy)-N-1,3-thiazol-2- ylpyridine-2-carboxamide | 477.9 |
| 9 | [chemical structure] | 4-[(1-methyl-2-{[2-(methyloxy) phenyl]amino}-1H- benzimidazol-5-yl)oxy]-N-[3- (methyloxy)propyl]pyridine-2- carboxamide | 462.5 |
| 10 | [chemical structure] | 4-({2-[(4-ethylphenyl)amino]- 1,3-benzoxazol-5-yl}oxy)-N- methylpyridine-2-carboxamide | 389.4 |
| 11 | [chemical structure] | 1-[(3-fluorophenyl)carbonyl]-4- {[4-(trifluoromethyl)phenyl]methyl}pierazine | 367.4 |
| 12 | [chemical structure] | 1-[2-(ethyloxy)phenyl]-4- {[3,4,5-tris(methyloxy)phenyl]carbonyl}piperazine | 401.5 |
| 13 | [chemical structure] | 1-(3-chlorophenyl)-4-{[2- (ethyloxy)phenyl]carbonyl}piperazine | 345.8 |
| 14 | [chemical structure] | 3-({4-[(2E)-3-phenylprop-2- enyl]piperazin-1-yl}carbonyl)-7- oxabicyclo[2.2.1]heptane-2- carboxylic acid | 371.4 |
| 15 | [chemical structure] | 1-[2-(methyloxy)phenyl]-4- {[3,4,5-tris(methyloxy) phenyl]carbonyl}piperazine | 387.4 |
| 16 | [chemical structure] | 3-[(4-pyridin-2-ylpiperazin-1- yl)carbonyl]-7-oxabicyclo[2.2.1]heptane-2-carboxylic acid | 332.4 |
| 17 | [chemical structure] | 3-pentyl-7-[(4-phenylpiperazin- 1-yl)carbonyl]-2-thioxo-2,3- dihydroquinazolin-4(1H)-one | 437.6 |
| 18 | [chemical structure] | 1-[(E)-({4-[(2,4-dimethyl- phenyl)methyl]piperazin-1-yl}imino)methyl]naphthalen-2-ol | 374.5 |
| 19 | [chemical structure] | 5-chloro-1-{[3- (trifluoromethyl)phenyl]methyl)-1H-indole-2,3-dione | 340.7 |
| 20 | [chemical structure] | 1-[(4-methylphenyl)methyl]-5- nitro-1H-indole-2,3-dione | 297.3 |
| 21 | [chemical structure] | 1-methyl-6,7-bis(methyloxy)-2- {[3-(methyloxy)phenyl]carbonyl}-1,2,3,4- tetrahydroisoquinoline | 342.4 |
| 22 | [chemical structure] | 1-methyl-6,7-bis(methyloxy)-2- (naphthalen-2-ylcarbonyl)- 1,2,3,4-tetrahydroisoquinoline | 362.4 |
| 23 | [chemical structure] | [2-(trifluoromethyl)phenyl]methyl 3-[4-(aminocarbonyl) phenyl]-2-cycloheptyl-1-oxo- 1,2,3,4-tetrahydroisoquinoline- 4-carboxylate | 565.6 |
| 24 | [chemical structure] | anthra[1,2,5]thiadiazole- 6,11-dione | 267.3 |
| 25 | [chemical structure] | benzo[b]oxanthrene-6,11-dione | 265.2 |
| 26 | [chemical structure] | ethyl 6,11-dioxo-6,11- dihydrobenzo[b]phenazine-2- carboxylate | 333.3 |
| 27 | [chemical structure] | N,N-dimethyl-9,10-dioxo-9,10- dihydroanthracene-1- sulfonamide | 316.3 |
| 28 | [chemical structure] | 2-(trifluoromethyl)-3-{[3,4,5- tris(methyloxy)phenyl]carbonyl}naphtho[2,3-b]furan-4,9-dione | 461.4 |
| 29 | [chemical structure] | 2-(2-oxopropyl)-2-phenyl-1H- indene-1,3(2H)-dione | 279.3 |
| 30 | [chemical structure] | ethyl 4-{5-[(3- nitrophenyl)carbonyl]-1,3- dioxo-1,3-dihydro-2H-isoindol- 2-yl}benzoate | 445.4 |
| 31 | [chemical structure] | 5,6-dichloro-2-[2-chloro-5- (trifluoromethyl)phenyl]-1H- isoindole-1,3(2H)-dione | 395.6 |
| 32 | [chemical structure] | 3-bromo-4-{[(2- fluorophenyl)methyl]oxy}-5- (methyloxy)benzaldehyde thiosemicarbazone | 413.3 |
| 33 | [chemical structure] | 2-[4-(3-chlorophenyl)piperazin- 1-yl]-5-nitrobenzaldehyde thiosemicarbazone | 419.9 |
| 34 | [chemical structure] | 4-{[2-(3-chlorophenyl) ethyl]amino}-3- nitrobenzaldehyde thiosemicarbazone | 378.9 |
| 35 | [chemical structure] | (1E)-6,9-dimethyl-2,3,4,9- tetrahydro-1H-carbazol-1-one thiosemicarbazone | 287.4 |
| 36 | [chemical structure] | (2E)-1,1′-bi(cyclohexan)-1-en-2- one thiosemicarbazone | 252.4 |
| 37 | [chemical structure] | 4-{[2-(4-chlorophenyl) ethyl]amino}-3-nitro- benzaldehyde thiosemicarbazone | 378.9 |
| 38 | [chemical structure] | 4-(diethylamino)-2-{[(4- fluorophenyl)methyl]oxy}benzaldhyde N-(2-piperidin-1- ylethyl)thiosemicarbazone | 486.7 |
| 39 | [chemical structure] | 3,4-bis(methyloxy)benzaldehyde (1,1-dioxido-1,2-benzisothiazol- 3-yl)(methyl)hydrazone | 360.4 |
| 40 | [chemical structure] | (2E)-2-[(4-chlorophenyl)(5- chlorothien-2-yl)methylidene]hydrazinecarboximidamide | 314.2 |
| 41 | [chemical structure] | 2-(4-amino-2-oxo-1-propyl-1,2- dihydroquinolin-3-yl)-1H- benzimidazole-6-carbonitrile | 344.4 |
| 42 | [chemical structure] | 4-amino-6-fluoro-7-({[4- (methyloxy)phenyl]methyl}amino)-3-[5-(4-methylpiperazin- 1-yl)-1H-benzimidazol-2-yl]quinolin-2(1H)-one | 528.6 |
| 43 | [chemical structure] | 6-chloro-3-(5-chloro-1H- benzimidazol-2-yl)-4-{[2- (dimethylamino)ethyl]amino}quinolin-2(1H)-one | 417.3 |
| 44 | [chemical structure] | 4-amino-5-(1H-benzimidazol-2- yl)-1-methyl-1,7-dihydro-6H- pyrazolo[3,4-b]pyridin-6-one | 281.3 |
| 45 | [chemical structure] | 5,5-dimethyl-4-methylidene-3- (2,4,6-trinitrophenyl)-1,3- oxazolidin-2-one | 339.2 |
| 46 | [chemical structure] | 5-methyl-2-[4- (methyloxy)phenyl]hexahydro- 1H-isoindole-1,3(2H)-dione | 274.3 |
| 47 | [chemical structure] | 5-methyl-2-(4- methylphenyl)hexahydro-1H- isoindole-1,3(2H)-dione | 258.3 |
| 48 | [chemical structure] | N-2˜-(4-chlorophenyl)-6,6- dimethyl-1,6-dihydro-1,3,5- triazine-2,4-diamine | 252.7 |
| 49 | [chemical structure] | (7Z)-7-(furan-2-ylmethylidene)- 3-phenyl-3,4-dihydro-2H- [1,3]thiazolo[3,2-a][1,3,5]triazin-6(7H)-one | 312.4 |
| 50 | [chemical structure] | (3aR,9R,9aR)-6,7-dihydroxy-9- [3,4,5-tris(methyloxy)phenyl]- 3a,4,9,9a-tetrahydronaphtho[2,3- c]furan-1(3H)-one | 387.4 |
| 51 | [chemical structure] | 6-chloro-2-(ethyloxy)-4-methyl- 3-(4-nitrophenyl)-3a,4,9,9a- tetrahydro-3H-pyrrolo[2,3- b]quinoxaline | 387.8 |
| 52 | [chemical structure] | ethyl 2-(ethyloxy)-4-methyl- 3a,4,9,9a-tetrahydro-3H- pyrrolo[2,3-b]quinoxaline-3- carboxylate | 304.4 |
| 53 | [chemical structure] | ethyl 4-({[2,5-bis(methyloxy) phenyl]amino}methyl)- 3,5-dimethyl-1H-pyrrole-2- carboxylate | 333.4 |
| 54 | [chemical structure] | 1-{3-[(6-amino-5-nitropyridin-2- yl)amino]propyl}-4-(2- chlorophenyl)-N-[(2S)-2- hydroxypropyl]-1H-pyrrole-3- carboxamide | 473.9 |
| 55 | [chemical structure] | (4-methylphenyl)(5-nitro-2- piperidin-1-ylphenyl)methanone | 325.4 |
| 56 | [chemical structure] | (2S,5R)-N˜1˜-(4-methyl- phenyl)-5-phenyl-N˜2˜-(2- pyridin-2-ylethyl)pyrrolidine- 1,2-dicarboxamide | 429.5 |
| 57 | [chemical structure] | 2-[(3S)-3-(acetylamino)-2- oxopyrrolidin-1-yl]-N-[2-(4- fluorophenyl)ethyl]acetamide | 322.4 |
| 58 | [chemical structure] | N-[2-(2,4-dichlorophenyl)ethyl]- 4-({(Z)-[(4,4-difluoro- cyclohexyl)imino][(3S)-3- methylpiperazin-1- yl]methyl}amino)benzamide | 553.5 |
| 59 | [chemical structure] | 4-[4-(methyloxy)phenyl]-5- phenylisoxazole | 252.3 |
| 60 | [chemical structure] | methyl 4-{[4-(1-methylethyl)- 2,3-dioxo-7-(trifluoromethyl)- 3,4-dihydroquinoxalin-1(2H)- yl]methyl}benzoate | 421.4 |
| 61 | [chemical structure] | (3beta, 16beta)-3,14,16- trihydroxybufa-20,22-dienolide | 403.5 |
| 62 | [chemical structure] | 2-(aminomethyl)-1-(2-pyridin-2- ylethyl)quinazolin-4(1H)-one | 281.3 |
| 63 | [chemical structure] | ethyl 4-{[5-[3,4-bis(methyloxy) phenyl]-7-(trifluoromethyl) pyrazolo[1,5-a]pyrimidin-3- yl]carbonyl}piperazine-1- carboxylate | 508.5 |
| 64 | [chemical structure] | 5-[3,4-bis(methyloxy)phenyl]-3- (piperidin-1-ylcarbonyl)-7- (trifluoromethyl)pyrazolo[1,5- a]pyrimidine | 435.4 |
| 65 | [chemical structure] | 5-[3,4-bis(methyloxy)phenyl]-N- methyl-N-(2-pyridin-2-ylethyl)- 7-(trifluoromethyl)pyrazolo[1,5- a]pyrimidine-2-carboxamide | 486.5 |
| 66 | [chemical structure] | 5-propyl-2-thien-2- ylpyrazolo[1,5-a]pyrimidin-7-ol | 260.3 |

[1695] BRIEF DESCRIPTION OF SEQUENCE LISTING

| SEQ ID NO: | Description |
|---|---|
| 1 | Draft genome assembly from The Genome Science Center in British Colombia, |
| | Canada of sequence from TOR2 isolate. TOR2_draft_genome_assembly_120403 Release 1 |
| 2 | CDC SARS-CoV strain sequence. Entire nucleotide sequence (Urbani strain) |
| 3-20 | Group-specific coronavirus gene products |
| | Feline infectious peritonitis virus (FIPV) |
| | 3/4 = ORF 3b; 5/6 = ORF 3X; 7/8 = ORF 3A |
| | Canine coronavirus |
| | 9/10 = ORF 7b; 11/12 = ORF 7a |
| | Avian infectious bronchitis virus |
| | 13/14 = ORF 5b; 15/16 = ORF 5a; 17/18 = ORF 3a; 19/20 = ORF 3b |
| 21-520 | 500 primers for left part |
| 521-1020 | 500 primers for right part |
| 1021-3520 | Forward primers from Table 4 |
| 3521-6020 | Reverse primers from Table 4 |
| 6021-6026 | FIG. 9 primers |
| 6027-6033 | FIG. 11 primers |
| 6034-6038 | Five primers from http://content.nejm.org/cgi/reprint/NEJMoa030781v2.pdf |
| 6039-6051 | PEP1 to PEP13 |
| 6052 | Extended PEP13 |
| 6053-6056 | 229E human coronavirus sequences |
| 6057-6060 | TGV sequences |
| 6061-6064 | PEDV sequences |
| 6065-6068 | Bovine coronavirus sequences |
| 6069-6071 | Murine hepatitis virus sequences |
| 6072-6075 | AIBV sequences |
| 6076-6170 | Primer sequences (forward) |
| 6171-6265 | Primer sequences (reverse) |
| 6266-6304 | Primer sequences (forward) |
| 6305-6343 | Primer sequences (reverse) |
| 6344-6366 | Primer sequences (forward) |
| 6367-6392 | Primer sequences (reverse) |
| 6393-6440 | Primer sequences (forward) F1-F48 |
| 6441-6487 | Primer sequences (reverse) R1-R47 |
| 6488-6559 | Primer sequences |
| 6560-6568 | Primer sequences |
| 6569 | The nsp2 proteinase (3CL-PRO) sequence in SARS coronavirus |
| 6570-72 | The nsp2 proteinases (3CLp) of avian IBV, MHV, and BCoV |
| 6573 | Consensus nsp2 proteinases sequence |
| 6574-6577 | IG sequences from FIG. 18 |
| 6578 | Expression construct of nSh in pCMVIII |
| 6579 | Expression construct of nS in pCMVIII |
| 6580 | Expression construct of nSh ΔTC in pCMVIII |
| 6581 | Expression construct of nS ΔTC in pCMVIII |
| 6582 | Expression construct of nS1h in pCMVIII |
| 6583 | Expression construct of nS1 in pCMVIII |
| 6584-6585 | Primers for cDNA amplification |
| 6585-6587 | Primers for RT-PCR |
| 6588-6809 | Component sequences of FIG. 23 (≧4 amino acids) |
| 6810-7179 | Component sequences of FIG. 24 (≧4 amino acids) |
| 7180-7187 | N-glycosylation sites within SEQ ID NO: 6039 |
| 7188-7189 | Component sequences of FIG. 25 |
| 7190 | Fragment of SEQ ID NO: 7188 |
| 7191 | Polynucleotide encoding SEQ ID NO: 7190 |
| 7192 | Amino acids 879-1005 of SEQ ID NO: 6042 |
| 7193 | Amino acids 879-980 of SEQ ID NO: 6042 |
| 7194 | Amino acids 901-1005 of SEQ ID NO: 6042 |
| 7195 | Amino acids 1144-1201 of SEQ ID NO: 6042 |
| 7196 | Amino acids 1144-1196 of SEQ ID NO: 6042 |
| 7197-7199 | Membrane fusion peptide regions |
| 7200-7206 | NadA-based polypeptides |
| 7207-7223 | N-glycosylation sites within SEQ ID NO: 6042 |
| 7224-7231 | Slippage region |
| 7232 | Orflab polyprotein |
| 7233-7244 | Orflab polyproteins |
| 7245-7247 | X₂ sequences for SEQ ID NOS 7233-7244 |
| 7248-7253 | Orflab polyproteins |
| 7254 | Zinc binding region 2 site |
| 7255-7271 | N-glycosylation sites in SEQ ID NOS: 6040-41, 6043, 6045-46, 6050-51 |
| 7272-7291 | Polypeptides and polynucleotides |
| 7292-7293 | Intergenic sequences |
| 7294-7301 | Nucleotides from 5′ end of SARSV genome followed by intergenic sequence |
| 7302-7306 | NadA constructs |
| 7307-7308 | Fragments of SEQ ID NO: 6042 |
| 7309 | NadA sequence |
| 7310-7311 | NadA leader sequences |
| 7312-7315 | Amino acid sequencess from NadA |
| 7316-7324 | PCR primers |
| 7325-7330 | Primers |
| 7331 | CCACC sequence |
| 7332-7336 | 3′ UTR forward primers |
| 7337-7341 | 3′ UTR reverse primers |
| 7342-7352 | 3′ UTR probes |
| 7353-7362 | 5′ UTR forward primers |
| 7363-7373 | 5′ UTR reverse primers |
| 7374-7385 | 5′ UTR probes |
| 7386 | Conserved octanucleotide |
| 7387 | Reverse complement of SEQ ID NO: 7293 |
| 7388 | Intergenic sequence |
| 7389 | Poly T |
| 7390 | Stem-loop sequence |
| 7391-7392 | Poly-glycine linkers |
| 7393 | Poly-histidine tag |
| 7394 | Nucleocapsid epitope site |
| 7395 | Antisense primer |
| 7396-7397 | Probes |
| 7398-7399 | Antigenic fragments of SEQ ID NO: 6042 |
| 7400-7639 | T-epitope analysis of SEQ ID NO: 6039 |
| 7640-7800 | T-epitope analysis of SEQ ID NO: 6040 |
| 7801-8040 | T-epitope analysis of SEQ ID NO: 6041 |
| 8041-8280 | T-epitope analysis of SEQ ID NO: 6042 |
| 8281-8486 | T-epitope analysis of SEQ ID NO: 6043 |
| 8487-8665 | T-epitope analysis of SEQ ID NO: 6044 |
| 8666-8820 | T-epitope analysis of SEQ ID NO: 6045 |
| 8821-9018 | T-epitope analysis of SEQ ID NO: 6046 |
| 9019-9131 | T-epitope analysis of SEQ ID NO: 6047 |
| 9132-9308 | T-epitope analysis of SEQ ID NO: 6048 |
| 9309-9437 | T-epitope analysis of SEQ ID NO: 6049 |
| 9438-9538 | T-epitope analysis of SEQ ID NO: 6050 |
| 9539-9752 | T-epitope analysis of SEQ ID NO: 6052 |
| 9753-9763 | Primers for spike protein amplification, particularly fragments of spike |
| 9764-9765 | N-glycosylation sites within SEQ ID NO: 6039 |
| 9766-9779 | Cleavage products for ORFlab (Table 10) |
| 9780-9782 | Forward primer, reverse primer, probe |
| 9783-9784 | Lysine-rich region |
| 9785-9798 | Oligonucleotides used for S. cerevisiae expression |
| 9799-9802 | Sequences from FIGS. 65 & 66 |
| 9803-9882 | Primers for E. coli cloning |
| 9883-9885 | BCV nucleotide sequences for FIGS. 3A, 3B, 3C |
| 9886-9891 | BCV amino acid sequences for FIGS. 4A, 4B, 4C, 4D, 4E, 4F |
| 9892 | BCV 5′ UTR |
| 9893 | BCV 3′ UTR |
| 9894-9896 | MHV nucleotide sequences for FIGS. 3A, 3B, 3C |
| 9897-9902 | MHV amino acid sequences for FIGS. 4A, 4B, 4C, 4D, 4E, 4F |
| 9903-9904 | AIBV nucleotide sequences for FIGS. 3A, 3B |
| 9905-9909 | AIBV amino acid sequences for FIGS. 4A, 4B, 4D, 4E, 4F |
| 9910 | AIBV 5′ UTR |
| 9911 | AIBV 3′ UTR |
| 9912-9913 | HOBMPRO, HOBHEGA nucleotide sequences for FIGS. 3B, 3C |
| 9914-9918 | Human CoV amino acid sequences for FIGS. 4A, 4B, 4C, 4E, 4F |
| 9919 | HCoV-OC43 5′ UTR |
| 9920 | HCoV-OC43 3′ UTR |
| 9921-9923 | pCMVKm2 vectors |
| 9924-9926 | Codon-optimised N, M and E sequences |
| 9927 | BNI-1 |
| 9928-9959 | Constituent amino acid sequences ≧4aa inferred from SEQ ID NO: 9927 |
| 9960 | ORF1ab variant |
| 9961 | ORF1a variant |
| 9962 | Spike variant |
| 9963 | Membrane variant |
| 9964 | Nucleocapsid variant |
| 9965-9966 | Short ORFs |
| 9967 | FRA complete genome |

[1696] TABLE 35

| Com- | | | | |
|---|---|---|---|---|
| pound | | | | |
| # | Structure | Source | Literature Reference | Patent Number |
| 1 | [chemical structure] | Aventis Pasteur | 1) Lang. J. -M.; Touraine, J. -L.; Trepo, C, et al. Lancet 1988, 2(8613): 702-5. | |
| 2 | [chemical structure] | Pfizer | Dong, M. K. et al. Pharmacologist 1988, 30(3): Abst 87.8. | ES 8602792 |
| 3 | [chemical structure] | Mitsui Chemicals | Mizuno, O. et al. 4th Int Conf Immunopharmacol (May 15-19, Osaka) 1988, Abst WS6-3. | EP 236929 |
| 4 | [chemical structure] | Roche | | EP 407788 |
| 5 | [chemical structure] | Fujisawa | 1) Iwami, M. et al. J Antibiot 1987, 40(5): 612-22. | JP 87161796 |
| 6 | [chemical structure] | Novartis | | FR 2604177 |
| 7 | [chemical structure] | Roche Bioscience | | US 4725622 |
| 8 | [chemical structure] | Roche Bioscience | | US 4727069 |
| 9 | [chemical structure] | Sumitomo | 1) Nishikaku, F. and Koga. Y. 4th Int Conf Immunopharmacol (May 15-19, Osaka) 1988, Abst WS6-8. | EP 248399 |
| 10 | [chemical structure] | SSP | | JP 88022053 |
| 11 | [chemical structure] | Roche Bioscience | | US 4725622 |
| 12 | [chemical structure] | Taisho | 1) Kameo, K. et al. Chem Pharm Bull 1988, 36(6): 2050-60. | EP 164101 |
| 13 | [chemical structure] | Novartis | | FR 2604177 |
| 14 | [chemical structure] | Novartis | | FR 2604177 |
| 15 | [chemical structure] | Novartis | | FR 2604177 |
| 16 | [chemical structure] | Novartis | | FR 2604177 |
| 17 | [chemical structure] | Novartis | | FR 2604177 |
| 18 | [chemical structure] | Novartis | | FR 2604177 |
| 19 | [chemical structure] | Novartis | | FR 2604177 |
| | [chemical structure] | | | |
| 20 | [chemical structure] | ADIR | | AU 8811669 |
| 21 | [chemical structure] | Pharmacia | | AU 8810908 |
| 22 | [chemical structure] | Aventis Pharma | | EP 284461 |
| 23 | [chemical structure] | Eniricerche | | EP 282891 |
| 24 | [chemical structure] | Pharmacia | | AU 8810908 |
| 25 | [chemical structure] | Pharmacia | | AU 8810908 |
| 26 | [chemical structure] | Abbott | Swanson, R. N. et at. 28th Intersci Conf Antimicrob Agents Chemother (Oct 23-26, Los Angeles) 1988, Abst 972. | |
| 27 | [chemical structure] | Mitsubishi Pharma | | JP 88119425 |
| 28 | [chemical structure] | Ortho-McNeil | | EP 292302 |
| 29 | [chemical structure] | Eniricerche | | EP 282891 |
| 30 | [chemical structure] | Aventis Pharma | | EP 284461 |
| 31 | [chemical structure] | ADIR | | AU 8811669 |
| 32 | [chemical structure] | ADIR | | AU 8811669 |
| 33 | [chemical structure] | ADIR | | AU 8811669 |
| 34 | [chemical structure] | ADIR | | AU 8811669 |
| 35 | [chemical structure] | ADIR | | AU 8811669 |
| 36 | [chemical structure] | ADIR | | AU 8811669 |
| 37 | [chemical structure] | SSP | | JP 88022053 |
| 38 | [chemical structure] | SSP | | JP 88022053 |
| 39 | [chemical structure] | SSP | | JP 88022053 |
| 40 | [chemical structure] | SSP | | JP 88022053 |
| 41 | [chemical structure] | SSP | | JP 88022053 |
| 42 | [chemical structure] | SSP | | JP 88022053 |
| 43 | [chemical structure] | SSP | | JP 88022053 |
| 44 | [chemical structure] | SSP | | JP 88022053 |
| 45 | [chemical structure] | SSP | | JP 88022053 |
| 46 | [chemical structure] | Ortho-McNeil | | EP 300741 |
| 47 | [chemical structure] | Aventis Pharma | 1) Fizames, C. et al. 15th Int Cong Chemother (July 19-24, Istanbul) 1987, Abst 605 | 1) GB 2053231 |
| 48 | [chemical structure] | Roche Bioscience | 1) WHO Drug Inform 1988, 2(4): 227. | 1) EP 135376 |
| 49 | [chemical structure] | ICN | 1) Sharma, B. S. et at. 3rd Intersci World Conf Inflamm, Antirheum Anaig Immunomodul (March 15-18, Monte- Carlo) 1989, 9. | EP 348446 |
| 50 | [chemical structure] | Toho Yakuhin | 1) Satoru, I. et al. Antivir Res 1988, 9(1-2): 37-46. | EP 188697 |
| 51 | [chemical structure] | Gifu University | 1) Hasegawa, A. et al. J Carbohyd Chem 1986, 5(3): 371-85. | |
| | [chemical structure] | | | |
| 52 | [chemical structure] | Gifu University | | |
| 53 | [chemical structure] | Gifu University | | |
| | [chemical structure] | | | |
| 54 | [chemical structure] | Mitsubishi Pharma | | EP 351435 |
| 55 | [chemical structure] | Aventis Pharma | | AU 8824582 |
| 56 | [chemical structure] | CNRS | 1) Chiron, M. et al. Biochem Pharmacol 1988, 37(5): 827-36. | |
| 57 | [chemical structure] | Aventis Pharma | 1) Schorlemmer, H. U.; Bartlett, R. R.; Dickneite, G.; Schwab, W.; Gebert, U.; Sedlacek, H. H. | AU 8824195 |
| 58 | [chemical structure] | Mitsubishi Pharma | | JP 88119425 |
| 59 | [chemical structure] | Mitsubishi Pharma | | JP 88119425 |
| 60 | [chemical structure] | Mitsubishi Pharma | | JP 88119425 |
| 61 | [chemical structure] | Mitsubishi Pharma | | JP 88119425 |
| 62 | [chemical structure] | Microbial Chemistry Research Foundation | | EP 310238 |
| 63 | [chemical structure] | Aventis Pharma | | AU 8824582 |
| 64 | [chemical structure] | Aventis Pharma | | AU 8824582 |
| 65 | [chemical structure] | ICN | Ramasamy, K. et al. J Med Chem 1989, 32(8): 1905-9. | |
| 66 | [chemical structure] | ICN | | |
| 67 | [chemical structure] | ICN | | |
| 68 | [chemical structure] | Roche | | AU 8931653 |
| 69 | [chemical structure] | Fujisawa | Shibata, T. et at. J Antibiot 1989, 42(9): 1356-61. | |
| 70 | [chemical structure] | Takeda | Tanida, S. et al. J Antibiot 1989, 42(11): 1619. | |
| 71 | [chemical structure] | Takeda | | |
| 72 | [chemical structure] | Aventis Pharma | | AU 8824195 |
| 73 | [chemical structure] | Aventis Pharma | | AU 8824195 |
| 74 | [chemical structure] | Aventis Pharma | | AU 8824195 |
| 75 | [chemical structure] | Aventis Pharma | | AU 8824195 |
| 76 | [chemical structure] | Aventis Pharma | | AU 8824195 |
| 77 | [chemical structure] | Aventis Pharma | | AU 8824195 |
| 78 | [chemical structure] | Aventis Pharma | | AU 8824195 |
| 79 | [chemical structure] | Aventis Pharma | | AU 8824195 |
| 80 | [chemical structure] | Aventis Pharma | | AU 8824195 |
| 81 | [chemical structure] | Aventis Pharma | | AU 8824195 |
| 82 | [chemical structure] | Aventis Pharma | | AU 8824195 |
| 83 | [chemical structure] | Aventis Pharma | | AU 8824195 |
| 84 | [chemical structure] | Aventis Pharma | | AU 8824195 |
| 85 | [chemical structure] | Aventis Pharma | | AU 8824195 |
| 86 | [chemical structure] | Aventis Pharma | | AU 8824195 |
| 87 | [chemical structure] | Aventis Pharma | | AU 8824195 |
| 88 | [chemical structure] | Aventis Pharma | | AU 8824195 |
| 89 | [chemical structure] | Aventis Pharma | | AU 8824195 |
| 90 | [chemical structure] | Microbial Chemistry Research Foundation | | EP 310238 |
| 91 | [chemical structure] | Harbor Branch Oceanographic Institution | | EP 331320 |
| 92 | [chemical structure] | Roche | 1) Herrmann. D. B. J. 17th Int Cong Chemother (June 23-28, Berlin) 1991, Abst 838. | EP 352652 |
| 93 | [chemical structure] | Roche | | AU 8931653 |
| 94 | [chemical structure] | Roche | | AU 8931653 |
| 95 | [chemical structure] | Roche | | AU 8931653 |
| 96 | [chemical structure] | Roche | | AU 8931653 |
| 97 | [chemical structure] | Roche | | AU 8931653 |
| 98 | [chemical structure] | Roche | | AU 8931653 |
| 99 | [chemical structure] | Roche | | AU 8931653 |
| 100 | [chemical structure] | Roche | | AU 8931653 |
| 101 | [chemical structure] | Scharper | 1) Migliorati. G. et al. 7th Int Cong Immunol (July 30-Aug 5, Berlin) 1989, Abst 106-62. | |
| 102 | [chemical structure] | Mitsubishi Pharma | | EP 351435 |
| 103 | [chemical structure] | Abbott GmbH | | EP 354693 |
| 104 | [chemical structure] | Abbott GmbH | | EP 354694 |
| 105 | [chemical structure] | Wyeth | | EP 354303 |
| 106 | [chemical structure] | Merck & Co. | | US 4866035 |
| 107 | [chemical structure] | Abbott GmbH | | EP 354693 |
| 108 | [chemical structure] | Abbott GmbH | | EP 354693 |
| 109 | [chemical structure] | Abbott GmbH | | EP 354693 |
| 110 | [chemical structure] | Abbott GmbH | | EP 354694 |
| 111 | [chemical structure] | Abbott GmbH | | EP354694 |
| 112 | [chemical structure] | Wyeth | | EP 354303 |
| 113 | [chemical structure] | Wyeth | | EP 354303 |
| 114 | [chemical structure] | Wyeth | | EP 354303 |
| 115 | [chemical structure] | Wyeth | | EP 354303 |
| 116 | [chemical structure] | Wyeth | | EP 354303 |
| 117 | [chemical structure] | Wyeth | | EP 354303 |
| 118 | [chemical structure] | Wyeth | | EP 354303 |
| 119 | [chemical structure] | Wyeth | | EP 354303 |
| 120 | [chemical structure] | Wyeth | | EP 354303 |
| 121 | [chemical structure] | Wyeth | | EP 354303 |
| 122 | [chemical structure] | Wyeth | | EP 354303 |
| 123 | [chemical structure] | Wyeth | | EP 354303 |
| 124 | [chemical structure] | Wyeth | | EP 354303 |
| 125 | [chemical structure] | Wyeth | | EP 354303 |
| 126 | [chemical structure] | Wyeth | | EP 354303 |
| 127 | [chemical structure] | Wyeth | | EP 354303 |
| 128 | [chemical structure] | Tanabe | | EP 372818 |
| 129 | [chemical structure] | Elan | 1) Eldon, M. A. et al. J Olin Pharmacol 1990, 30(4): 352-7. | |
| 130 | [chemical structure] | Lipha | | EP 341104 |
| 131 | [chemical structure] | Tanabe | | EP 372818 |
| 132 | [chemical structure] | Tanabe | | EP 372818 |
| 133 | [chemical structure] | Tanabe | | EP 372818 |
| 134 | [chemical structure] | Tanabe | | EP 372818 |
| 135 | [chemical structure] | Tanabe | | EP 372818 |
| 136 | [chemical structure] | Tanabe | | EP 372818 |
| 137 | [chemical structure] | Tanabe | | EP 372818 |
| 138 | [chemical structure] | Tanabe | | EP 372818 |
| 139 | [chemical structure] | Tanabe | | EP 372818 |
| 140 | [chemical structure] | Bristol-Myers Squibb | | US 4935493 |
| 141 | [chemical structure] | Takeda | | JP 90193940 |
| 142 | [chemical structure] | Pharmacia | | EP 429627 |
| 143 | [chemical structure] | Merck & Co. | | EP 393256 |
| 144 | [chemical structure] | Merck & Co. | | EP 393256 |
| 145 | [chemical structure] | Merck & Co. | | EP 393256 |
| 146 | [chemical structure] | Merck & Co. | | EP 393256 |
| 147 | [chemical structure] | Bristol-Myers Squibb | | US 4935493 |
| 148 | [chemical structure] | Bristol-Myers Squibb | | US 4935493 |
| 149 | [chemical structure] | Bristol-Myers Squibb | | US 4935493 |
| 150 | [chemical structure] | Bristol-Myers Squibb | | US 4935493 |
| 151 | [chemical structure] | Bristol-Myers Squibb | | US 4935493 |
| 152 | [chemical structure] | Sclavo | | EP 375058 |
| 153 | [chemical structure] | SmithKline Beecham | | AU 9059014 |
| 154 | [chemical structure] | American Biotechnology | | WO 9102733 |
| 155 | [chemical structure] | Novartis | | EP 417803 |
| 156 | [chemical structure] | Polifarma | | EP 423077 |
| 157 | [chemical structure] | SCRAS | | GB 2228937 |
| 158 | [chemical structure] | Santen | | EP 455833 |
| 159 | [chemical structure] | American Biotechnology | | WO 9102733 |
| 160 | [chemical structure] | Pharmacia | | EP 429627 |
| 161 | [chemical structure] | Pharmacia | | EP 429627 |
| 162 | [chemical structure] | Pharmacia | | EP 429627 |
| 163 | [chemical structure] | Pharmacia | | EP 429627 |
| 164 | [chemical structure] | Pharmacia | | EP 429627 |
| 165 | [chemical structure] | Pharmacia | | EP 429627 |
| 166 | [chemical structure] | Pharmacia | | EP 429627 |
| 167 | [chemical structure] | Pharmacia | | EP 429627 |
| 168 | [chemical structure] | Novartis | | EP 417803 |
| 169 | [chemical structure] | Abbott GmbH | | WO 9111448 |
| 170 | [chemical structure] | Abbott GmbH | | WO 9112255 |
| 171 | [chemical structure] | Leland Stanford Junior University | | US 4996221 |
| 172 | [chemical structure] | Aventis Pharma | | EP 438813 |
| 173 | [chemical structure] | SCRAS | | GB 2228937 |
| 174 | [chemical structure] | SCRAS | | GB 2228937 |
| 175 | [chemical structure] | SCRAS | | GB 2228937 |
| 176 | [chemical structure] | SCRAS | | GB 2228937 |
| 177 | [chemical structure] | SCRAS | | GB 2228937 |
| 178 | [chemical structure] | SCRAS | | GB 2228937 |
| 179 | [chemical structure] | Leland Stanford Junior University | | US 4996221 |
| 180 | [chemical structure] | Leland Stanford Junior University | | US 4996221 |
| 181 | [chemical structure] | Leland Stanford Junior University | | US 4996221 |
| 182 | [chemical structure] | Leland Stanford Junior University | | US 4996221 |
| 183 | [chemical structure] | Leland Stanford Junior University | | US 4996221 |
| 184 | [chemical structure] | Bar-llan University | 1) Rephaeli, A. et al. Int J Cancer 1991, 49(1): 66. | EP 302349 |
| 185 | [chemical structure] | Abbott GmbH | | WO 9112255 |
| 186 | [chemical structure] | Abbott GmbH | | WO 9112255 |
| 187 | [chemical structure] | Abbott GmbH | | WO 9111448 |
| 188 | [chemical structure] | Abbott GmbH | | WO 9111448 |
| 189 | [chemical structure] | Abbott GmbH | | WO 9111448 |
| 190 | [chemical structure] | Abbott GmbH | | WO 9111448 |
| 191 | [chemical structure] | Abbott GmbH | | WO 9111448 |
| 192 | [chemical structure] | Abbott GmbH | | WO 9111448 |
| 193 | [chemical structure] | Abbott GmbH | | WO 9111448 |
| 194 | [chemical structure] | Abbott GmbH | | WO 9111448 |
| 195 | [chemical structure] | Bashkir Medical University | Dianov, V. M. et al. Khim Farm Zh SSSR 1991, 25(1): 40. | |
| 196 | [chemical structure] | Microbial Chemistry Research Foundation | Kumagai, H. et al. J Antibiot 1991, 44(9): 1029. | |
| 197 | [chemical structure] | Allergan | | US 5081261 |
| 198 | [chemical structure] | Santen | | EP 455833 |
| 199 | [chemical structure] | Santen | | EP 455833 |
| 200 | [chemical structure] | Allergan | | US 5081261 |
| 201 | [chemical structure] | Allergan | | US 5081261 |
| 202 | [chemical structure] | Allergan | | US 5081261 |
| 203 | [chemical structure] | Allergan | | US 5081261 |
| 204 | [chemical structure] | Ono | 1) Satoh, M. et al. 51st Annu Meet Jpn Cancer Assoc (Sept 29-Oct 1. Osaka) 1992. Abst 1450 | EP 553786 |
| 205 | [chemical structure] | Nowicky | 1) Hohenwarter, O.; Strutzenberger, K.; Katinger, H.; Liepins, A.; Nowicky, J. W. Drug Exp Clin Res 1992, 18(Suppl.): 1. | WO 8300486 |
| 206 | [chemical structure] | Tanabe | | US 5210075 |
| | [chemical structure] | | | |
| 207 | [chemical structure] | Fujisawa | 1) Kurimura, M. et al. Pept Chem (1991) 1992, 361. | |
| 208 | [chemical structure] | University of South Florida | 1) Hadden, J. W. 5th Intersci World Conf Inflamm, Antirheum, Analg, Immunomodul (April 25-28, Geneva) 1993, Abst 257. | |
| 209 | [chemical structure] | Glycomed | | WO 9310796 |
| 210 | [chemical structure] | Karolinska Institute | 1) Algarra, I. et al. Int J Cancer 1993, 54: 518. | |
| 211 | [chemical structure] | Tanabe | | US 5210075 |
| | [chemical structure] | | | |
| 212 | [chemical structure] | Tanabe | | US 5210075 |
| | [chemical structure] | | | |
| 213 | [chemical structure] | Santen | | EP 558287 |
| 214 | [chemical structure] | Glycomed | | WO 9310796 |
| 215 | [chemical structure] | Glycomed | | WO 9310796 |
| 216 | [chemical structure] | Glycomed | | WO 9310796 |
| 217 | [chemical structure] | Microbial Chemistry Research Foundation | | |
| 218 | [chemical structure] | LEK | 1) Sersa, G. et al. Mol Biother 1992, 4: 188. | EP 477912 |
| 219 | [chemical structure] | Microbial Chemistry Research Foundation | 1) Ueno, M. et al. J Antibiot 1993. 46(5): 719. | |
| 220 | [chemical structure] | Microbial Chemistry Research Foundation | | |
| 221 | [chemical structure] | Lilly | 1) Bartlett, MS. et al. | EP 561639 |
| | | | 33rd lntersci Conf | |
| | | | Antimicrob Agents | |
| | | | Chemother (Oct 17-20, | |
| | | | New Orleans) 1993, | |
| | | | Abst 369. | |
| 222 | [chemical structure] | Santen | | EP 558287 |
| 223 | [chemical structure] | Santen | | EP 558287 |
| 224 | [chemical structure] | ADIR | | EP 572308 |
| 225 | [chemical structure] | Santen | | JP 93239045 |
| 226 | [chemical structure] | Microbial Chemistry Research Foundation | Ueno, M. et al. J Antibiot 1993, 46(11): 1658. | |
| 227 | [chemical structure] | ADIR | | EP 572308 |
| 228 | [chemical structure] | Leo | | WO 9401398 |
| 229 | [chemical structure] | Leo | | WO 9401398 |
| 230 | [chemical structure] | Leo | | WO 9401398 |
| 231 | [chemical structure] | Santen | | JP 93239045 |
| 232 | [chemical structure] | Kirin Brewery | 1) Monta, M. et al. J Med Chem 1995, 38(12): 2176. | 1) EP 609437 |
| 233 | [chemical structure] | Kirin Brewery | | 1) EP 609437 |
| 234 | [chemical structure] | Kirin Brewery | | 1) EP 609437 |
| 235 | [chemical structure] | Kirin Brewery | | EP 609437 |
| 236 | [chemical structure] | Kirin Brewery | | EP 609437 |
| | [chemical structure] | | | |
| 237 | [chemical structure] | Kirin Brewery | | EP 609437 |
| | [chemical structure] | | | |
| 238 | [chemical structure] | 3M Pharmaceuticals | Lindstrom, K. J. et al. 211th ACS Natl Meet (March 24-28, New Orleans) 1996, Abst MEDI 210. | US 5482936 |
| 239 | [chemical structure] | Roche Bioscience | Smith, D. B. et al. J Org Chem 1996, 61(6): 2236. | WO 9522538 |
| 240 | [chemical structure] | AstraZeneca | | WO 9611943 |
| 241 | [chemical structure] | AstraZeneca | | WO 9611943 |
| 242 | [chemical structure] | AstraZeneca | | WO 9611943 |
| 243 | [chemical structure] | AstraZeneca | | WO 9611943 |
| 244 | [chemical structure] | AstraZeneca | | WO 9611943 |
| 245 | [chemical structure] | AstraZeneca | | WO 9611943 |
| 246 | [chemical structure] | AstraZeneca | | WO 9611943 |
| 247 | [chemical structure] | AstraZeneca | | WO 9611943 |
| 248 | [chemical structure] | AstraZeneca | | WO 9611943 |
| 249 | [chemical structure] | Peptech | | WO 9612739 |
| 250 | [chemical structure] | Japan Tobacco | | JP 96113555 |
| 251 | [chemical structure] | Harvard College | | JP 96504177 |
| 252 | [chemical structure] | Shire BioChem | | WO 9619494 |
| 253 | [chemical structure] | Japan Tobacco | | JP 96113555 |
| 254 | [chemical structure] | Japan Tobacco | | JP 96113555 |
| 255 | [chemical structure] | Japan Tobacco | | JP 96113555 |
| 256 | [chemical structure] | Shire BioChem | | WO 9619494 |
| 257 | [chemical structure] | Harvard College | | JP 96504177 |
| 258 | [chemical structure] | Harvard College | | JP 96504177 |
| 259 | [chemical structure] | Harvard College | | JP 96504177 |
| 260 | [chemical structure] | Harvard College | | JP 96504177 |
| 261 | [chemical structure] | Harvard College | | JP 96504177 |
| 262 | [chemical structure] | Harvard College | | JP 96504177 |
| 263 | [chemical structure] | Japan Tobacco | | JP 96113555 |
| 264 | [chemical structure] | Japan Tobacco | | JP 96113555 |
| 265 | [chemical structure] | Japan Tobacco | | JP 96113555 |
| 266 | [chemical structure] | Univ. Minnesota | | WO 9623793 |
| 267 | [chemical structure] | Univ. Minnesota | | WO 9623793 |
| 268 | [chemical structure] | Univ. Minnesota | | WO 9623793 |
| 269 | [chemical structure] | Univ. Minnesota | | WO 9623793 |
| 270 | [chemical structure] | Univ. Minnesota | | WO 9623793 |
| 271 | [chemical structure] | AstraZeneca | | WO 9630397 |
| 272 | [chemical structure] | AstraZeneca | | WO 9630397 |
| 273 | [chemical structure] | AstraZeneca | | WO 9630397 |
| 274 | [chemical structure] | AstraZeneca | | WO 9630397 |
| 275 | [chemical structure] | Kyowa Hakko | | WO 9633989 |
| 276 | [chemical structure] | AstraZeneca | | WO 9630397 |
| 277 | [chemical structure] | AstraZeneca | | WO 9630397 |
| 278 | [chemical structure] | AstraZeneca | | WO 9630397 |
| 279 | [chemical structure] | AstraZeneca | | WO 9630397 |
| 280 | [chemical structure] | AstraZeneca | | WO 9630397 |
| 281 | [chemical structure] | AstraZeneca | | WO 9630397 |
| 282 | [chemical structure] | AstraZeneca | | WO 9630397 |
| 283 | [chemical structure] | Glycomed | | WO 9635700 |
| 284 | [chemical structure] | Kyowa Hakko | | WO 9633989 |
| 285 | [chemical structure] | Kyowa Hakko | | WO 9633989 |
| 286 | [chemical structure] | Kyowa Hakko | | WO 9633989 |
| 287 | [chemical structure] | Kyowa Hakko | | WO 9633989 |
| 288 | [chemical structure] | Aston University | Kinchington, D. et al. 4th Conf Retroviruses Opportunistic Infect (Jan 22-26, Washington DC) 1997, Abst. | |
| 289 | [chemical structure] | Roche | 1) Fiedler-Nagy, C. et al. Agent Action 1989, 27(3-4): 313-5. | EP 169571 |
| 290 | [chemical structure] | NFCR | 1) Forest Laboratories, Inc. Annual Report 1994. | WO 9517890 |
| 291 | [chemical structure] | Sumitomo Pharmaceuticals | | EP 248399 |
| 292 | [chemical structure] | Aventis Pharma | | EP 248734 |
| 293 | [chemical structure] | May & Baker | | EP 252682 |
| 294 | [chemical structure] | Sumitomo Pharmaceuticals | | EP 248399 |
| 295 | [chemical structure] | Sumitomo Pharmaceuticals | | EP 248399 |
| 296 | [chemical structure] | Sumitomo Pharmaceuticals | | EP 248399 |
| 297 | [chemical structure] | Sumitomo Pharmaceuticals | | EP 248399 |
| 298 | [chemical structure] | Sumitomo Pharmaceuticals | | EP 248399 |
| 299 | [chemical structure] | Sumitomo Pharmaceuticals | | EP 248399 |
| 300 | [chemical structure] | Sumitomo Pharmaceuticals | | EP 248399 |
| 301 | [chemical structure] | Sumitomo Pharmaceuticals | | EP 248399 |
| 302 | [chemical structure] | Aventis Pharma | | EP 248734 |
| 303 | [chemical structure] | Aventis Pharma | | EP 248734 |
| 304 | [chemical structure] | Aventis Pharma | | EP 248734 |
| 305 | [chemical structure] | Aventis Pharma | | EP 248734 |
| 306 | [chemical structure] | Aventis Pharma | | EP 248734 |
| 307 | [chemical structure] | Aventis Pharma | | EP 248734 |
| 308 | [chemical structure] | Pfizer | | AU 8783281 |
| 309 | [chemical structure] | Harbor Branch Found. | | US 4755529 |
| 310 | [chemical structure] | Roche Bioscience | | AU 8782540 |
| 311 | [chemical structure] | Roche Bioscience | | AU 8782540 |
| 312 | [chemical structure] | Roche Bioscience | | AU 8782540 |
| 313 | [chemical structure] | Roche Bioscience | | AU 8782540 |
| 314 | [chemical structure] | Novartis | | EP 296110 |
| 315 | [chemical structure] | Novartis | 1) Lam, C. et al. Antimicrob Agents Chemother 1991, 35(3): 500. | AU 8822785 |
| 316 | [chemical structure] | Schering-Plough | | EP 318214 |
| 317 | [chemical structure] | Novartis | | AU 8822785 |
| 318 | [chemical structure] | Novartis | | AU 8822785 |
| 319 | [chemical structure] | Kyorin | | EP 310096 |
| 320 | [chemical structure] | Kyorin | | EP 310096 |
| 321 | [chemical structure] | Kyorin | | EP 310096 |
| 322 | [chemical structure] | Kyorin | | EP 310096 |
| 323 | [chemical structure] | Kyorin | | EP 310096 |
| 324 | [chemical structure] | Kyorin | | EP 310096 |
| 325 | [chemical structure] | Santen | | EP 326326 |
| 326 | [chemical structure] | Roche | | AU 8929658 |
| 327 | [chemical structure] | Taisho | 1) Takeshita, K. et al. Int J Immunother 1988, 4(2): 97-106. | JP 79141750 |
| 328 | [chemical structure] | Harbor Branch Found. | 1) Burres, N.S. et al. Proc Amer Assoc Cancer Res 1989, 30: Abst 1914. | EP 331320 |
| 329 | [chemical structure] | Novartis | | EP 296110 |
| 330 | [chemical structure] | Novartis | | EP 296110 |
| 331 | [chemical structure] | Novartis | | EP 296110 |
| 332 | [chemical structure] | Schering-Plough | | EP 318214 |
| 333 | [chemical structure] | Leo | | WO 8910351 |
| 334 | [chemical structure] | Scripps Clinic Res. Found. | | WO 8908658 |
| 335 | [chemical structure] | Scripps Clinic Res. Found. | | WO 8908658 |
| 336 | [chemical structure] | Scripps Clinic Res. Found. | | WO 8908658 |
| 337 | [chemical structure] | Scripps Clinic Res. Found. | | WO 8908658 |
| 338 | [chemical structure] | Scripps Clinic Res. Found. | | WO 8908658 |
| 339 | [chemical structure] | Scripps Clinic Res. Found. | | WO 8908658 |
| 340 | [chemical structure] | Scripps Clinic Res. Found. | | WO 8908658 |
| 341 | [chemical structure] | Roche | | AU 8929658 |
| 342 | [chemical structure] | Roche | | AU 8929658 |
| 343 | [chemical structure] | Roche | | AU 8929658 |
| 344 | [chemical structure] | Leo | | WO 8910351 |
| 345 | [chemical structure] | Leo | | WO 8910351 |
| 346 | [chemical structure] | Leo | | WO 8910351 |
| 347 | [chemical structure] | Leo | | WO 8910351 |
| 348 | [chemical structure] | Leo | | WO 8910351 |
| 349 | [chemical structure] | Leo | | WO 8910351 |
| 350 | [chemical structure] | Tanabe Seiyaku | 1) Ueno, M. et al. Jpn J Pharmacol 1992, 58(Suppl. 1): Abst O-210. | AU 8942368 |
| 351 | [chemical structure] | Aventis Pharma | | EP 378456 |
| 352 | [chemical structure] | Greenwich Pharm. | | AU 9047648 |
| 353 | [chemical structure] | Roche | | EP 384349 |
| 354 | [chemical structure] | Greenwich Pharm. | | AU 9047648 |
| 355 | [chemical structure] | Greenwich Pharm. | | AU 9047648 |
| 356 | [chemical structure] | Aventis Pharma | | EP 378456 |
| 357 | [chemical structure] | Aventis Pharma | | EP 378456 |
| 358 | [chemical structure] | Aventis Pharma | | EP 378456 |
| 359 | [chemical structure] | Aventis Pharma | | EP 378456 |
| 360 | [chemical structure] | Aventis Pharma | | EP 378456 |
| 361 | [chemical structure] | Aventis Pharma | | EP 378456 |
| 362 | [chemical structure] | Aventis Pharma | | EP 378456 |
| 363 | [chemical structure] | Leo | Binderup, L. et al. Biochem Pharmacol 1991, 42(8): 1569. | EP 460032 |
| 364 | [chemical structure] | Microbial Chemistry Research Foundation | Muraoka, Y. et al. 30th Intersci Conf Antimicrob Agents Chemother (Oct 21-24, Atlanta) 1990, Abst 801 | |
| 365 | [chemical structure] | Kyorin | | AU 9057029 |
| 366 | [chemical structure] | Greenwich Pharm. | | AU 9057691 |
| 367 | [chemical structure] | Leo | | EP 460032 |
| 368 | [chemical structure] | Leo | | EP 460032 |
| 369 | [chemical structure] | Leo | | EP 460032 |
| 370 | [chemical structure] | Leo | | EP 460032 |
| 371 | [chemical structure] | Leo | | EP 460032 |
| 372 | [chemical structure] | Leo | | EP 460032 |
| 373 | [chemical structure] | Leo | | EP 460032 |
| 374 | [chemical structure] | Novartis | Kricek. F. et al. Immunopharmacology 1997, 36(1): 27. | AU 9057875 |
| 375 | [chemical structure] | Amersham Health | 1) Frey, C. L. et al. 31st Intersci Conf Antimicrob Agents Chemother (Sept 29-Oct 2, Chicago) 1991, Abst 85. | AU 9059014 |
| 376 | [chemical structure] | Roche | | EP 384349 |
| 377 | [chemical structure] | Roche | | EP 384349 |
| 378 | [chemical structure] | Roche | | AU 9059154 |
| 379 | [chemical structure] | Kyorin | | AU 9057029 |
| 380 | [chemical structure] | Greenwich Pharm. | | AU 9057691 |
| 381 | [chemical structure] | Greenwich Pharm. | | AU 9057691 |
| 382 | [chemical structure] | Greenwich Pharm. | | AU 9057691 |
| 383 | [chemical structure] | Greenwich Pharm. | | AU 9057691 |
| 384 | [chemical structure] | Greenwich Pharm. | | AU 9057691 |
| 385 | [chemical structure] | Greenwich Pharm. | | AU 9057691 |
| 386 | [chemical structure] | Greenwich Pharm. | | AU 9057691 |
| 387 | [chemical structure] | Greenwich Pharm. | | AU 9057691 |
| 388 | [chemical structure] | Greenwich Pharm. | | AU 9057691 |
| 389 | [chemical structure] | Greenwich Pharm. | | AU 9057691 |
| 390 | [chemical structure] | Greenwich Pharm. | | AU 9057691 |
| 391 | [chemical structure] | Greenwich Pharm. | | AU 9057691 |
| 392 | [chemical structure] | Greenwich Pharm. | | AU 9057691 |
| 393 | [chemical structure] | Amersham Health | | AU 9059014 |
| 394 | [chemical structure] | Amersham Health | | AU 9059014 |
| 395 | [chemical structure] | Amersham Health | | AU 9059014 |
| 396 | [chemical structure] | Amersham Health | | AU 9059014 |
| 397 | [chemical structure] | Amersham Health | | AU 9059014 |
| 398 | [chemical structure] | Amersham Health | | AU 9059014 |
| 399 | [chemical structure] | Amersham Health | | AU 9059014 |
| 400 | [chemical structure] | Amersham Health | | AU 9059014 |
| 401 | [chemical structure] | Amersham Health | | AU 9059014 |
| 402 | [chemical structure] | Leo | 1) Elstner, E. et al. Blood 1994, 84(6): 1960. | EP 479871 |
| 403 | [chemical structure] | Leo | | WO 9100855 |
| 404 | [chemical structure] | SPA | | EP 421074 |
| 405 | [chemical structure] | Hitachi Chemical | | EP 421682 |
| 406 | [chemical structure] | Roche | | AU 9059154 |
| 407 | [chemical structure] | Roche | | AU 9059154 |
| 408 | [chemical structure] | Roche | | AU 9059154 |
| 409 | [chemical structure] | Roche | | AU 9059154 |
| 410 | [chemical structure] | Roche | | AU 9059154 |
| 411 | [chemical structure] | Fujisawa | 1) Manda, T. et al. Jpn J Pharmacol 1997, 73(Suppl. 1): Abst P-140. | EP 412404 |
| 412 | [chemical structure] | Allergan | | US 5013850 |
| 413 | [chemical structure] | Leo | | WO 9100855 |
| 414 | [chemical structure] | Leo | | WO 9100855 |
| 415 | [chemical structure] | Leo | | WO 9100855 |
| 416 | [chemical structure] | Leo | | WO 9100855 |
| 417 | [chemical structure] | Leo | | EP 479871 |
| 418 | [chemical structure] | Leo | | EP 479871 |
| 419 | [chemical structure] | Leo | | WO 9109841 |
| 420 | [chemical structure] | Hitachi Chemical | | EP 421682 |
| 421 | [chemical structure] | Hitachi Chemical | | EP 421682 |
| 422 | [chemical structure] | Hitachi Chemical | | EP 421682 |
| 423 | [chemical structure] | Hitachi Chemical | | EP 421682 |
| 424 | [chemical structure] | Hitachi Chemical | | EP 421682 |
| 425 | [chemical structure] | Hitachi Chemical | | EP 421682 |
| 426 | [chemical structure] | Hitachi Chemical | | EP 421682 |
| 427 | [chemical structure] | Hitachi Chemical | | EP 421682 |
| 428 | [chemical structure] | SPA | | EP 421074 |
| 429 | [chemical structure] | SPA | | EP 421074 |
| 430 | [chemical structure] | SPA | | EP 421074 |
| 431 | [chemical structure] | SPA | | EP 421074 |
| 432 | [chemical structure] | SPA | | EP 421074 |
| 433 | [chemical structure] | SPA | | EP 421074 |
| 434 | [chemical structure] | SPA | | EP 421074 |
| 435 | [chemical structure] | SPA | | EP 421074 |
| 436 | [chemical structure] | SPA | | EP 421074 |
| 437 | [chemical structure] | SPA | | EP 421074 |
| 438 | [chemical structure] | SPA | | EP 421074 |
| 439 | [chemical structure] | SPA | | EP 421074 |
| 440 | [chemical structure] | SPA | | EP 421074 |
| 441 | [chemical structure] | SPA | | EP 421074 |
| 442 | [chemical structure] | SPA | | EP 421074 |
| 443 | [chemical structure] | SPA | | EP 421074 |
| 444 | [chemical structure] | Allergan | | US 5013850 |
| 445 | [chemical structure] | Allergan | | US 5013850 |
| 446 | [chemical structure] | Allergan | | US 5013850 |
| 447 | [chemical structure] | Allergan | | US 5013850 |
| 448 | [chemical structure] | Allergan | | US 5013850 |
| 449 | [chemical structure] | Allergan | | US 5013850 |
| 450 | [chemical structure] | Allergan | | US 5013850 |
| 451 | [chemical structure] | Allergan | | US 5013850 |
| 452 | [chemical structure] | Allergan | | US 5013850 |
| 453 | [chemical structure] | Allergan | | US 5013850 |
| 454 | [chemical structure] | Allergan | | US 5013850 |
| 455 | [chemical structure] | Allergan | | US 5013850 |
| 456 | [chemical structure] | Allergan | | US 5013850 |
| 457 | [chemical structure] | Allergan | | US 5013850 |
| 458 | [chemical structure] | Allergan | | US 5013850 |
| 459 | [chemical structure] | Allergan | | US 5013850 |
| 460 | [chemical structure] | Allergan | | US 5013850 |
| 461 | [chemical structure] | New England Med. Center Hosp. | | WO 9116339 |
| 462 | [chemical structure] | Leo | | EP 506794 |
| 463 | [chemical structure] | Fujisawa | | WO 9119708 |
| 464 | [chemical structure] | Roche | 1) Hill, C. H. 6th SCI- RSC Med Chem Symp (Sept 8-11, Cambridge) 1991, Abst S18. | EP 384349 |
| 465 | [chemical structure] | New England Med. Center Hosp. | | WO 9116339 |
| 466 | [chemical structure] | Alder | | US 5145842 |
| 467 | [chemical structure] | Harbor Branch Found. | | US 5091368 |
| 468 | [chemical structure] | Aventis Pharma | | EP 476658 |
| 469 | [chemical structure] | Merck & Co. | | EP 480713 |
| 470 | [chemical structure] | Alder | | US 5145842 |
| 471 | [chemical structure] | Alder | | US 5145842 |
| 472 | [chemical structure] | Alder | | US 5145842 |
| 473 | [chemical structure] | Alder | | US 5145842 |
| 474 | [chemical structure] | Alder | US 5145842 | |
| 475 | [chemical structure] | Alder | | US 5145842 |
| 476 | [chemical structure] | Alder | | US 5145842 |
| 477 | [chemical structure] | Aventis Pharma | | EP 476658 |
| 478 | [chemical structure] | Aventis Pharma | | EP 476658 |
| 479 | [chemical structure] | Aventis Pharma | | EP 476658 |
| 480 | [chemical structure] | Aventis Pharma | | EP 476658 |
| 481 | [chemical structure] | Aventis Pharma | | EP 476658 |
| 482 | [chemical structure] | Aventis Pharma | | EP 476658 |
| 483 | [chemical structure] | Aventis Pharma | | EP 476658 |
| 484 | [chemical structure] | Aventis Pharma | | EP 476658 |
| 485 | [chemical structure] | Harbor Branch Found. | | US 5091368 |
| 486 | [chemical structure] | Merck & Co. | | EP 480713 |
| 487 | [chemical structure] | Merck & Co. | | EP 480713 |
| 488 | [chemical structure] | Merck & Co. | | EP 480713 |
| 489 | [chemical structure] | Merck & Co. | | EP 480713 |
| 490 | [chemical structure] | Kyowa Hakko | Miwa, K. et al. 113th Annu Meet Pharmaceut Soc Jpn (March 29-31, Osaka) 1993, Abst 30CC 13-1. | EP 505058 |
| 491 | [chemical structure] | Roche | | EP 510473 |
| 492 | [chemical structure] | Beaufour-Ipsen | 1) Carde, P. et al. Proc Amer Soc Clin Oncol 1991, 10: Abst 324. | AU 8810261 |
| 493 | [chemical structure] | Roche | | EP 510473 |
| 494 | [chemical structure] | Roche | | EP 510473 |
| 495 | [chemical structure] | Roche | | EP 510473 |
| 496 | [chemical structure] | Fujisawa | | WO 9218483 |
| 497 | [chemical structure] | Kyowa Hakko | | EP 526840 |
| 498 | [chemical structure] | Kyowa Hakko | | EP 526840 |
| 499 | [chemical structure] | Kyowa Hakko | | EP 526840 |
| 500 | [chemical structure] | Aventis Pharma | | EP 538783 |
| 501 | [chemical structure] | Fujisawa Nakamura, K. et al. Chem Pharm Bull 1993, 41(5): 894. | AU 8783152 | |
| 502 | [chemical structure] | Hayashibara | 1) Yamamoto, I. et al. 18th Int Cong Chemother (June 27-July 2, Stockholm) 1993, Abst 516. | EP 539196 |
| 503 | [chemical structure] | Kyowa Hakko | | WO 9312116 |
| 504 | [chemical structure] | GlaxoSmithKline | | WO 9314082 |
| 505 | [chemical structure] | Otsuka | | JP 93132484 |
| 506 | [chemical structure] | Pfizer | | US 5236926 |
| 507 | [chemical structure] | Aventis Pharma | | EP 538783 |
| 508 | [chemical structure] | Aventis Pharma | | EP 538783 |
| 509 | [chemical structure] | GlaxoSmithKline | | WO 9314082 |
| 510 | [chemical structure] | GlaxoSmithKline | | WO 9314082 |
| 511 | [chemical structure] | GlaxoSmithKline | | WO 9314082 |
| 512 | [chemical structure] | GlaxoSmithKline | | WO 9314082 |
| 513 | [chemical structure] | GlaxoSmithKline | | WO 9314082 |
| 514 | [chemical structure] | GlaxoSmithKline | | WO 9314082 |
| 515 | [chemical structure] | Otsuka | | JP 93132484 |
| 516 | [chemical structure] | Otsuka | | JP 93132484 |
| 517 | [chemical structure] | Otsuka | | JP 93132484 |
| 518 | [chemical structure] | Otsuka | | JP 93132484 |
| 519 | [chemical structure] | Otsuka | | JP 93132484 |
| 520 | [chemical structure] | Pfizer | | US 5236926 |
| 521 | [chemical structure] | Pfizer | | US 5236926 |
| 522 | [chemical structure] | Pfizer | | US 5236926 |
| 523 | [chemical structure] | Pfizer | | US 5236926 |
| 524 | [chemical structure] | Pfizer | | US 5236926 |
| 525 | [chemical structure] | Sumitomo | | US 5258396 |
| 526 | [chemical structure] | Wyeth | | US 5312831 |
| 527 | [chemical structure] | Cell Therapeutics | | WO 9411001 |
| 528 | [chemical structure] | Greenwich Pharm. | | WO 9411381 |
| 529 | [chemical structure] | Otsuka | | JP 94100561 |
| 530 | [chemical structure] | Wyeth | | US 5312831 |
| 531 | [chemical structure] | Wyeth | | US 5312831 |
| 532 | [chemical structure] | Cell Therapeutics | | WO 9411001 |
| 533 | [chemical structure] | Cell Therapeutics | | WO 9411001 |
| 534 | [chemical structure] | Cell Therapeutics | | WO 9411001 |
| 535 | [chemical structure] | Cell Therapeutics | | WO 9411001 |
| 536 | [chemical structure] | Cell Therapeutics | | WO 9411001 |
| 537 | [chemical structure] | Cell Therapeutics | | WO 9411001 |
| 538 | [chemical structure] | Cell Therapeutics | | WO 9411001 |
| 539 | [chemical structure] | Cell Therapeutics | | WO 9416704 |
| 540 | [chemical structure] | Immunex | 1) Immunex Corporation Press Release 1994, July 21. | WO 9506031 |
| 541 | [chemical structure] | Greenwich Pharm. | | WO 9411381 |
| 542 | [chemical structure] | Greenwich Pharm. | | WO 9411381 |
| 543 | [chemical structure] | Greenwich Pharm. | | WO 9411381 |
| 544 | [chemical structure] | Greenwich Pharm. | | WO 9411381 |
| 545 | [chemical structure] | Greenwich Pharm. | | WO 9411381 |
| 546 | [chemical structure] | Greenwich Pharm. | | WO 9411381 |
| 547 | [chemical structure] | Greenwich Pharm. | | WO 9411381 |
| 548 | [chemical structure] | Greenwich Pharm. | | WO 9411381 |
| 549 | [chemical structure] | Greenwich Pharm. | | WO 9411381 |
| 550 | [chemical structure] | Greenwich Pharm. | | WO 9411381 |
| 551 | [chemical structure] | Greenwich Pharm. | | WO 9411381 |
| 552 | [chemical structure] | Greenwich Pharm. | | WO 9411381 |
| 553 | [chemical structure] | British Technol. | | GB 2278842 |
| 554 | [chemical structure] | Cell Therapeutics | | WO 9416704 |
| 555 | [chemical structure] | Cell Therapeutics | | WO 9416704 |
| 556 | [chemical structure] | Cell Therapeutics | | WO 9416704 |
| 557 | [chemical structure] | Cell Therapeutics | | WO 9416704 |
| 558 | [chemical structure] | Cell Therapeutics | | WO 9416704 |
| 559 | [chemical structure] | Cell Therapeutics | | WO 9416704 |
| 560 | [chemical structure] | Cell Therapeutics | | WO 9416704 |
| 561 | [chemical structure] | Otsuka | | JP 94100561 |
| 562 | [chemical structure] | Otsuka | | JP 94100561 |
| 563 | [chemical structure] | Otsuka | | JP 94100561 |
| 564 | [chemical structure] | Otsuka | | JP 94100561 |
| 565 | [chemical structure] | Otsuka | | JP 94100561 |
| 566 | [chemical structure] | Otsuka | | JP 94100561 |
| 567 | [chemical structure] | Otsuka | | JP 94100561 |
| 568 | [chemical structure] | Otsuka | | JP 94100561 |
| 569 | [chemical structure] | Otsuka | | JP 94100561 |
| 570 | [chemical structure] | Otsuka | | JP 94100561 |
| 571 | [chemical structure] | Abbott GmbH | | WO 9500493 |
| 572 | [chemical structure] | Abbott GmbH | | WO 9500507 |
| 573 | [chemical structure] | Leo | | WO 9502577 |
| 574 | [chemical structure] | GlaxoSmithKline | | WO 9504734 |
| 575 | [chemical structure] | Kyorin | Kono, Y. et al. 115th Annu Meet Pharmaceut Soc Jpn (March 29-31, Sendai) 1995, Abst 30 (A3) 10-3. | EP 538477 |
| 576 | [chemical structure] | Abbott GmbH | | WO 9500507 |
| 577 | [chemical structure] | Abbott GmbH | | WO 9500507 |
| 578 | [chemical structure] | Abbott GmbH | | WO 9500507 |
| 579 | [chemical structure] | Abbott GmbH | | WO 9500493 |
| 580 | [chemical structure] | Abbott GmbH | | WO 9500493 |
| 581 | [chemical structure] | Abbott GmbH | | WO 9500493 |
| 582 | [chemical structure] | Abbott GmbH | | WO 9500493 |
| 583 | [chemical structure] | Abbott GmbH | | WO 9500493 |
| 584 | [chemical structure] | Abbott GmbH | | WO 9500493 |
| 585 | [chemical structure] | Abbott GmbH | | WO 9500493 |
| 586 | [chemical structure] | Abbott GmbH | | WO 9500493 |
| 587 | [chemical structure] | Abbott GmbH | | WO 9500493 |
| 588 | [chemical structure] | Abbott GmbH | | WO 9500493 |
| 589 | [chemical structure] | Abbott GmbH | | WO 9500493 |
| 590 | [chemical structure] | Sanofi- Synthelabo | | EP 644197 |
| 591 | [chemical structure] | Sanofi- Synthelabo | | CA 2125021 |
| 592 | [chemical structure] | Kyowa Hakko | | WO 9509153 |
| 593 | [chemical structure] | GlaxoSmithKline | | WO 9504734 |
| 594 | [chemical structure] | GlaxoSmithKline | | WO 9504734 |
| 595 | [chemical structure] | GlaxoSmithKline | | WO 9504734 |
| 596 | [chemical structure] | GlaxoSmithKline | | WO 9504734 |
| 597 | [chemical structure] | GlaxoSmithKline | | WO 9504734 |
| 598 | [chemical structure] | GlaxoSmithKline | | WO 9504734 |
| 599 | [chemical structure] | Japan Tobacco | | JP 95002779 |
| 600 | [chemical structure] | Pharmacia | 1) Gozzi, P. et al. J Pharmacol Exp Ther 1999, 291(1): 199. | JP 1995501330 |
| 601 | [chemical structure] | Bayer | | US 5409932 |
| 602 | [chemical structure] | Bayer | | US 5411960 |
| 603 | [chemical structure] | Sanofi- Synthelabo | | EP 644197 |
| 604 | [chemical structure] | Sanofi- Synthelabo | | EP 644197 |
| 605 | [chemical structure] | Sanofi- Synthelabo | | EP 644197 |
| 606 | [chemical structure] | Sanofi- Synthelabo | | CA 2125021 |
| 607 | [chemical structure] | Sanofi- Synthelabo | | CA 2125021 |
| 608 | [chemical structure] | Sanofi- Synthelabo | | CA 2125021 |
| 609 | [chemical structure] | Sanofi- Synthelabo | | CA 2125021 |
| 610 | [chemical structure] | Sanofi- Synthelabo | | CA 2125021 |
| 611 | [chemical structure] | Sanofi- Synthelabo | | CA 2125021 |
| 612 | [chemical structure] | Sanofi- Synthelabo | | CA 2125021 |
| 613 | [chemical structure] | Baxter | France, C. P. et al. Drug Develop Res 1995, 35: 49. | EP 396282 |
| 614 | [chemical structure] | Bayer | | U5 5411960 |
| 615 | [chemical structure] | Bayer | | US 5411960 |
| 616 | [chemical structure] | Bayer | | US 5411960 |
| 617 | [chemical structure] | Bayer | | US 5411960 |
| 618 | [chemical structure] | Bayer | | US 5409932 |
| 619 | [chemical structure] | Lilly | | WO 9517382 |
| 620 | [chemical structure] | Millennium | | WO 9518610 |
| 621 | [chemical structure] | Aventis Pharma | | WO 9520578 |
| 622 | [chemical structure] | Cell Therapeutics | | WO 9522546 |
| 623 | [chemical structure] | Lilly | | WO 9517382 |
| 624 | [chemical structure] | Lilly | | WO 9517382 |
| 625 | [chemical structure] | Lilly | | WO 9517382 |
| 626 | [chemical structure] | Lilly | | WO 9517382 |
| 627 | [chemical structure] | Lilly | | WO 9517382 |
| 628 | [chemical structure] | Lilly | | WO 9517382 |
| 629 | [chemical structure] | Lilly | | WO 9517382 |
| 630 | [chemical structure] | Lilly | | WO 9517382 |
| 631 | [chemical structure] | Lilly | | WO 9517382 |
| 632 | [chemical structure] | CytoMed | | WO 9518610 |
| 633 | [chemical structure] | CytoMed | | WO 9518610 |
| 634 | [chemical structure] | CytoMed | | WO 9518610 |
| 635 | [chemical structure] | CytoMed | | WO 9518610 |
| 636 | [chemical structure] | CytoMed | | WO 9518610 |
| 637 | [chemical structure] | CytoMed | | WO 9518610 |
| 638 | [chemical structure] | CytoMed | | WO 9518610 |
| 639 | [chemical structure] | CytoMed | | WO 9518610 |
| 640 | [chemical structure] | CytoMed | | WO 9518610 |
| 641 | [chemical structure] | CytoMed | | WO 9518610 |
| 642 | [chemical structure] | CytoMed | | WO 9518610 |
| 643 | [chemical structure] | CytoMed | | WO 9518610 |
| 644 | [chemical structure] | CytoMed | | WO 9518610 |
| 645 | [chemical structure] | CytoMed | | WO 9518610 |
| 646 | [chemical structure] | CytoMed | | WO 9518610 |
| 647 | [chemical structure] | CytoMed | | WO 9518610 |
| 648 | [chemical structure] | CytoMed | | WO 9518610 |
| 649 | [chemical structure] | CytoMed | | WO 9518610 |
| 650 | [chemical structure] | Duphar | | EP 664287 |
| 651 | [chemical structure] | Japan Tobacco | | JP 95002779 |
| 652 | [chemical structure] | Japan Tobacco | | JP 95002779 |
| 653 | [chemical structure] | Japan Tobacco | | JP 95002779 |
| 654 | [chemical structure] | Japan Tobacco | | JP 95002779 |
| 655 | [chemical structure] | Japan Tobacco | | JP 95002779 |
| 656 | [chemical structure] | Japan Tobacco | | JP 95002779 |
| 657 | [chemical structure] | Japan Tobacco | | JP 95002779 |
| 658 | [chemical structure] | Japan Tobacco | | JP 95002779 |
| 659 | [chemical structure] | Aventis Pharma | | WO 9520578 |
| 660 | [chemical structure] | Aventis Pharma | | WO 9520578 |
| 661 | [chemical structure] | Aventis Pharma | | WO 9520578 |
| 662 | [chemical structure] | Aventis Pharma | | WO 9520578 |
| 663 | [chemical structure] | Kyowa Hakko | | WO 9509153 |
| 664 | [chemical structure] | Kyowa Hakko | | WO 9509153 |
| 665 | [chemical structure] | Kyowa Hakko | | WO 9509153 |
| 666 | [chemical structure] | Kyowa Hakko | | WO 9509153 |
| 667 | [chemical structure] | Kyowa Hakko | | WO 9509153 |
| 668 | [chemical structure] | Kyowa Hakko | | WO 9509153 |
| 669 | [chemical structure] | Kyowa Hakko | | WO 9509153 |
| 670 | [chemical structure] | Sanofi- Synthelabo | | WO 9526958 |
| 671 | [chemical structure] | Cell Therapeutics | | WO 9522546 |
| 672 | [chemical structure] | Cell Therapeutics | | WO 9522546 |
| 673 | [chemical structure] | Cell Therapeutics | | WO 9522546 |
| 674 | [chemical structure] | Cell Therapeutics | | WO 9522546 |
| 675 | [chemical structure] | Cell Therapeutics | | WO 9522546 |
| 676 | [chemical structure] | Cell Therapeutics | | WO 9522546 |
| 677 | [chemical structure] | Duphar | | EP 664287 |
| 678 | [chemical structure] | Duphar | | EP 664287 |
| 679 | [chemical structure] | Duphar | | EP 664287 |
| 680 | [chemical structure] | Duphar | | EP 664287 |
| 681 | [chemical structure] | Duphar | | EP 664287 |
| 682 | [chemical structure] | Duphar | | EP 664287 |
| 683 | [chemical structure] | Sanofi- Synthelabo | | WO 9529672 |
| 684 | [chemical structure] | Sanofi- Synthelabo | | WO 9526958 |
| 685 | [chemical structure] | Sanofi- Synthelabo | | WO 9526958 |
| 686 | [chemical structure] | Takeda | | WO 9535296 |
| 687 | [chemical structure] | Vertex | | WO 9535308 |
| 688 | [chemical structure] | Daikin | | EP 711766 |
| 689 | [chemical structure] | Sanofi- Synthelabo | | WO 9533751 |
| 690 | [chemical structure] | Entropin | | WO 9534561 |
| 691 | [chemical structure] | Takeda | | WO 9535296 |
| 692 | [chemical structure] | Takeda | | WO 9535296 |
| 693 | [chemical structure] | Takeda | | WO 9535296 |
| 694 | [chemical structure] | Takeda | | WO 9535296 |
| 695 | [chemical structure] | Vertex | | WO 9535308 |
| 696 | [chemical structure] | Vertex | | WO 9535308 |
| 697 | [chemical structure] | Vertex | | WO 9535308 |
| 698 | [chemical structure] | Ajinomoto | | US 5464819 |
| 699 | [chemical structure] | Sanofi- Synthelabo | | WO 9529672 |
| 700 | [chemical structure] | Sanofi- Synthelabo | | WO 9529672 |
| 701 | [chemical structure] | Sanofi- Synthelabo | | WO 9529672 |
| 702 | [chemical structure] | 3M Pharmaceuticals | | US 5482936 |
| 703 | [chemical structure] | 3M Pharmaceuticals | | US 5482936 |
| 704 | [chemical structure] | 3M Pharmaceuticals | | US 5482936 |
| 705 | [chemical structure] | 3M Pharmaceuticals | | US 5482936 |
| 706 | [chemical structure] | Entropin | | WO 9534561 |
| 707 | [chemical structure] | Entropin | | WO 9534561 |
| 708 | [chemical structure] | Entropin | | WO 9534561 |
| 709 | [chemical structure] | Entropin | | WO 9534561 |
| 710 | [chemical structure] | Entropin | | WO 9534561 |
| 711 | [chemical structure] | Entropin | | WO 9534561 |
| 712 | [chemical structure] | Entropin | | WO 9534561 |
| 713 | [chemical structure] | Ajinomoto | | US 5464819 |
| 714 | [chemical structure] | Ajinomoto | | US 5464819 |
| 715 | [chemical structure] | Ajinomoto | | US 5464819 |
| 716 | [chemical structure] | Sanofi- Synthelabo | | WO 9533751 |
| 717 | [chemical structure] | Sanofi- Synthelabo | | WO 9533751 |
| 718 | [chemical structure] | Sanofi- Synthelabo | | WO 9533751 |
| 719 | [chemical structure] | Sanofi- Synthelabo | | WO 9533751 |
| 720 | [chemical structure] | Sanofi- Synthelabo | | WO 9533751 |
| 721 | [chemical structure] | Sanofi- Synthelabo | | WO 9533751 |
| 722 | [chemical structure] | Daikin | | EP 711766 |
| 723 | [chemical structure] | Daikin | | EP 711766 |
| 724 | [chemical structure] | Daikin | | EP 711766 |
| 725 | [chemical structure] | Daikin | | EP 711766 |
| 726 | [chemical structure] | Taisho | 1) Yoshida, H. et al. Biol Pharm Bull 1997, 20(1): 94. | JP 93051358 |
| 727 | [chemical structure] | Microbial Chemistry Research Foundation | | JP 96176157 |

[1697]

| | | | | |
|---|---|---|---|---|
| 728 | [chemical structure] | Sankyo | Shiozaki, M. et al. Tetrahedron Lett 1996 37(40): 7271. | |
| 729 | [chemical structure] | Nippon Kayaku | | JP 96283290 |
| 730 | [chemical structure] | Tanabe | | WO 9640641 |
| 731 | [chemical structure] | Tanabe | | WO 9640641 |
| 732 | [chemical structure] | Daiichi Pharma- ceutical | 1) Kawagoe, K. et al. AFMC Int Med Chem Symp (Sept 3-8, Tokyo) 1995, Abst P13M183. | JP 97059236 |
| 733 | [chemical structure] | Vertex | | WO 9722618 |
| 734 | [chemical structure] | Vertex | | WO 9722618 |
| 735 | [chemical structure] | Vertex | | WO 9722618 |
| 736 | [chemical structure] | Vertex | | WO 9722618 |
| 737 | [chemical structure] | Vertex | | WO 9722618 |
| 738 | [chemical structure] | Vertex | | WO 9722618 |
| 739 | [chemical structure] | Astra Zeneca | | WO 9731023 |
| 740 | [chemical structure] | Univer- sity of Penn- sylvania | | WO 9733603 |
| 741 | [chemical structure] | Eisai | | EP 889032 |
| 742 | [chemical structure] | AWD. pharma | | WO 9734874 |
| 743 | [chemical structure] | Astra Zeneca | | WO 9731023 |
| 744 | [chemical structure] | Astra Zeneca | | WO 9731023 |
| 745 | [chemical structure] | Astra Zeneca | | WO 9731023 |
| 746 | [chemical structure] | Astra Zeneca | | WO 9731023 |
| 747 | [chemical structure] | AWD. pharma | | WO 9734874 |
| 748 | [chemical structure] | AWD. pharma | | WO 9734874 |
| 749 | [chemical structure] | Leo | | WO 9737972 |
| 750 | [chemical structure] | Taisho | | JP 97194476 |
| 751 | [chemical structure] | Leo | | WO 9737972 |
| 752 | [chemical structure] | Leo | | WO 9737972 |
| 753 | [chemical structure] | Leo | | WO 9737972 |
| 754 | [chemical structure] | Leo | | WO 9737972 |
| 755 | [chemical structure] | Leo | | WO 9737972 |
| 756 | [chemical structure] | Glaxo- Smith Kline | | WO 9743250 |
| 757 | [chemical structure] | Astra Zeneca | 1) Saem- strand, B. et al. J Pharmacol Exp Ther 1999, 228(3): 1174. | EP 0463514 |
| 758 | [chemical structure] | Pharm- acia | | WO 9745409 |
| 759 | [chemical structure] | Pharm- acia | | WO 9745409 |
| 760 | [chemical structure] | Pharm- acia | | WO 9745409 |
| 761 | [chemical structure] | Pharm- acia | | WO 9745409 |
| 762 | [chemical structure] | Eisai | Nagai, M. et al. 217th ACS Natl Meet (March 21-25, Ana- heim) 1999, Abst MEDI 050. | EP 889032 |
| 763 | [chemical structure] | Bashkir Medical Univer- sity | Sadykov, R. F. et al. Naunyn- Schmied Arch Pharm- acol 1998, 358(1, Suppl. 2): Abst P 52.28. | |
| 764 | [chemical structure] | LEK | | EP 477912 |
| 765 | [chemical structure] | Gruen- enthal | | EP 856513 |
| 766 | [chemical structure] | Gruen- enthal | | EP 856513 |
| 767 | [chemical structure] | Gruen- enthal | | EP 856513 |
| 768 | [chemical structure] | Gruen- enthal | | EP 856513 |
| 769 | [chemical structure] | Astra Zeneca | | WO 9828275 |
| 770 | [chemical structure] | Astra Zeneca | | WO 9828275 |
| 771 | [chemical structure] | Astra Zeneca | | WO 9828270 |
| 772 | [chemical structure] | Astra Zeneca | | WO 9828270 |
| 773 | [chemical structure] | Astra Zeneca | | WO 9828270 |
| 774 | [chemical structure] | Astra Zeneca | | WO 9828270 |
| 775 | [chemical structure] | Astra Zeneca | | WO 9828270 |
| 776 | [chemical structure] | Astra Zeneca | | WO 9828270 |
| 777 | [chemical structure] | Astra Zeneca | | WO 9828270 |
| 778 | [chemical structure] | Astra Zeneca | | WO 9828270 |
| 779 | [chemical structure] | Astra Zeneca | | WO 9828270 |
| 780 | [chemical structure] | Astra Zeneca | | WO 9828270 |
| 781 | [chemical structure] | Astra Zeneca | | WO 9828270 |
| 782 | [chemical structure] | Astra Zeneca | | WO 9828270 |
| 783 | [chemical structure] | Astra Zeneca | | WO 9828270 |
| 784 | [chemical structure] | Astra Zeneca | | WO 9828270 |
| 785 | [chemical structure] | Astra Zeneca | | WO 9828270 |
| 786 | [chemical structure] | Astra Zeneca | | WO 9828270 |
| 787 | [chemical structure] | Astra Zeneca | | WO 9828270 |
| 788 | [chemical structure] | Astra Zeneca | | WO 9828270 |
| 789 | [chemical structure] | Japan Energy | | JP 98231297 |
| 790 | [chemical structure] | Japan Energy | | JP 98231297 |
| 791 | [chemical structure] | Japan Energy | | JP 98231297 |
| 792 | [chemical structure] | Japan Energy | | JP 98231297 |
| 793 | [chemical structure] | Japan Energy | | JP 98231297 |
| 794 | [chemical structure] | Celgene | 1) Moreira, A. L. et al. J Neuro- Oncol 1999, 43(2): 109. | U.S. Pat. No. 5463063 |
| 795 | [chemical structure] | Daiichi Pharma- ceutical | Koiwa, T. et al. J Antibiot 1999, 52(2): 198. | |
| 796 | [chemical structure] | Celgene | | U.S. Pat. No. 5874448 |
| 797 | [chemical structure] | Celgene | | U.S. Pat. No. 5874448 |
| 798 | [chemical structure] | Celgene | | U.S. Pat. No. 5874448 |
| 799 | [chemical structure] | Celgene | | U.S. Pat. No. 5874448 |
| 800 | [chemical structure] | Celgene | | U.S. Pat. No. 5874448 |
| 801 | [chemical structure] | Eisai | | EP 889032 |
| 802 | [chemical structure] | Merck & Co. | | WO 9909984 |
| 803 | [chemical structure] | Merck & Co. | | WO 9909984 |
| 804 | [chemical structure] | Merck & Co. | | WO 9909984 |
| 805 | [chemical structure] | Merck & Co. | | WO 9909984 |
| 806 | [chemical structure] | Hokur- iku | | JP 99080156 |
| 807 | [chemical structure] | Hokur- iku | | JP 99080156 |
| 808 | [chemical structure] | Hokur- iku | | JP 99080156 |
| 809 | [chemical structure] | Hokur- iku | | JP 99080156 |
| 810 | [chemical structure] | Hokur- iku | | JP 99080156 |
| 811 | [chemical structure] | SSP | | CA 2255337 |
| 812 | [chemical structure] | SSP | | CA 2255337 |
| 813 | [chemical structure] | SSP | | CA 2255337 |
| 814 | [chemical structure] | Abbott | Madar, D. et al. 222nd ACS Natl Meet (Aug 26-30, Chicago) 2001, Abst MEDI 7. | EP 1068187 |
| 815 | [chemical structure] | Active Biotech | | WO 9955678 |
| 816 | [chemical structure] | Amer- sham | 1) Gesser, B. et al. Proc Natl Acad Sci USA 1997, 94(26): 14620. | WO 9601318 |
| 817 | [chemical structure] | Kowa | | WO 9944995 |
| 818 | [chemical structure] | Kowa | | WO 9944995 |
| 819 | [chemical structure] | Kowa | | WO 9944995 |
| 820 | [chemical structure] | OM Pharma | | WO 0000462 |
| 821 | [chemical structure] | OM Pharma | | WO 0000462 |
| 822 | [chemical structure] | Ono | | WO 0003980 |
| 823 | [chemical structure] | Ono | | WO 0003980 |
| 824 | [chemical structure] | Ono | | WO 0003980 |
| 825 | [chemical structure] | Ono | | WO 0003980 |
| 826 | [chemical structure] | Ono | | WO 0003980 |
| 827 | [chemical structure] | Ono | | WO 0003980 |
| 828 | [chemical structure] | Ono | | WO 0003980 |
| 829 | [chemical structure] | Univer- sity of Bristol | | WO 0014114 |
| 830 | [chemical structure] | Eisai | Hibi, S. et al. Bioorg Med Chem Lett 2000, 10(7): 623. | EP 0889032 |
| 831 | [chemical structure] | Janssen | | WO 0021959 |
| 832 | [chemical structure] | Janssen | | WO 0021959 |
| 833 | [chemical structure] | Janssen | | WO 0021959 |
| 834 | [chemical structure] | Janssen | | WO 0021959 |
| 835 | [chemical structure] | Fuji- sawa | | WO 0021979 |
| 836 | [chemical structure] | Abbott | 1) Liu, G. et al. 220th ACS Natl Meet (Aug 20-24, Washington DC) 2000, Abst MEDI 171. | 1) U.S. Pat. No. 6110922 |
| 837 | [chemical structure] | Cancer Re- search UK | | WO 0052046 |
| 838 | [chemical structure] | Cancer Re- search UK | | WO 0052046 |
| 839 | [chemical structure] | Cancer Re- search UK | | WO 0052046 |
| 840 | [chemical structure] | South- ern Re- search Institute | | WO 0112197 |
| 841 | [chemical structure] | South- ern Re- search Institute | | WO 0112197 |
| 842 | [chemical structure] | Abbott Labs. | | EP 1068187 |
| 843 | [chemical structure] | Abbott | | EP 1068187 |
| 844 | [chemical structure] | Abbott | | EP 1068187 |
| 845 | [chemical structure] | Fuji- sawa | Spears, G. et al. 21st Symp Med Chem (Nov 28-30, Kyoto) 2001, Abst 2P-29. | |
| 846 | [chemical structure] | Austin Re- search Institute | Tselios, T. et al. J Med Chem 2002, 45(2): 275. | |
| 847 | [chemical structure] | Eukar- ion | | WO 0204454 |
| 848 | [chemical structure] | Nobex | 1) Riggs- Sauthier, J. A. et al. 224th ACS Natl Meet (Aug 18-22, Boston) 2002, Abst MEDI 305. | WO 0218324 |
| 849 | [chemical structure] | Tularik | | WO 0238107 |
| 850 | [chemical structure] | Tularik | | WO 0238107 |
| 851 | [chemical structure] | Tularik | | WO 0238107 |
| 852 | [chemical structure] | Tularik | | WO 0238107 |
| 853 | [chemical structure] | Tularik | | WO 0238107 |
| 854 | [chemical structure] | Tularik | | WO 0238107 |
| 855 | [chemical structure] | Tularik | | WO 0238107 |
| 856 | [chemical structure] | Tularik | | WO 0238107 |
| 857 | [chemical structure] | Tularik | | WO 0238107 |
| 858 | [chemical structure] | Sanofi- Synthe labo | | WO 0242269 |
| 859 | [chemical structure] | Sanofi- Synthe labo | | WO 0242269 |
| 860 | [chemical structure] | Sanofi- Synthe labo | | WO 0242269 |
| 861 | [chemical structure] | Sanofi- Synthe labo | | WO 0242269 |
| 862 | [chemical structure] | Sanofi- Synthe labo | | WO 0242269 |
| 863 | [chemical structure] | Sanofi- Synthe labo | | WO 0242269 |
| 864 | [chemical structure] | Sanofi- Synthe labo | | WO 0242269 |
| 865 | [chemical structure] | Sanofi- Synthe labo | | WO 0242269 |
| 866 | [chemical structure] | Sanofi- Synthe labo | | WO 0242269 |
| 867 | [chemical structure] | Bristol- Myers Squibb | | WO 0244181 |
| 868 | [chemical structure] | Bristol- Myers Squibb | | WO 0244181 |
| 869 | [chemical structure] | Bristol- Myers Squibb | | WO 0244181 |
| 870 | [chemical structure] | Bristol- Myers Squibb | | WO 0244181 |
| 871 | [chemical structure] | Bristol- Myers Squibb | | WO 0244181 |
| 872 | [chemical structure] | Bristol- Myers Squibb | | WO 0244181 |
| 873 | [chemical structure] | Bristol- Myers Squibb | | WO 0244181 |
| 874 | [chemical structure] | Bristol- Myers Squibb | | WO 0244181 |
| 875 | [chemical structure] | Bristol- Myers Squibb | | WO 0244181 |
| 876 | [chemical structure] | Cell Thera- peutics | | WO 0268421 |
| 877 | [chemical structure] | Cell Thera- peutics | | WO 0268421 |
| 878 | [chemical structure] | Gruen- enthal | | WO 0290317 |
| 881 | [chemical structure] | May & Baker | | EP 252682 |
| 882 | [chemical structure] | Kyorin | | EP 310096 |
| 883 | [chemical structure] | Kyorin | | EP 310096 |
| 884 | [chemical structure] | Kyorin | | EP 310096 |
| 885 | [chemical structure] | Kyorin | | EP 310096 |
| 886 | [chemical structure] | Kyorin | | EP 310096 |
| 887 | [chemical structure] | Kyorin | | EP 310096 |
| 888 | [chemical structure] | Santen | | EP 326326 |
| 889 | [chemical structure] | Roche | | AU 8929658 |
| 890 | [chemical structure] | Taisho | 1) Takeshita, K. et al. Int J Immunother 1988, 4(2): 97-106. | JP 79141750 |
| 891 | [chemical structure] | Harbor Branch Found. | 1) Burres, N. S. et al. Proc Amer Assoc Cancer Res 1989, 30: Abst 1914. | EP 331320 |
| 892 | [chemical structure] | Scripps Clinic Res. Found. | | WO 8908658 |
| 893 | [chemical structure] | Scripps Clinic Res. Found. | | WO 8908658 |
| 894 | [chemical structure] | Scripps Clinic Res. Found. | | WO 8908658 |
| 895 | [chemical structure] | Scripps Clinic Res. Found. | | WO 8908658 |
| 896 | [chemical structure] | Scripps Clinic Res. Found. | | WO 8908658 |
| 897 | [chemical structure] | Scripps Clinic Res. Found. | | WO 8908658 |
| 898 | [chemical structure] | Scripps Clinic Res. Found. | | WO 8908658 |
| 899 | [chemical structure] | Roche | | AU 8929658 |
| 900 | [chemical structure] | Roche | | AU 8929658 |
| 901 | [chemical structure] | Roche | | AU 8929658 |
| 902 | [chemical structure] | Aventis Pharma | | EP 378456 |
| 903 | [chemical structure] | Roche | | EP 384349 |
| 904 | [chemical structure] | Green- wich Pharm. | | AU 9047648 |
| 905 | [chemical structure] | Aventis Pharma | | EP 378456 |
| 906 | [chemical structure] | Aventis Pharma | | EP 378456 |
| 907 | [chemical structure] | Aventis Pharma | | EP 378456 |
| 908 | [chemical structure] | Aventis Pharma | | EP 378456 |
| 909 | [chemical structure] | Aventis Pharma | | EP 378456 |
| 910 | [chemical structure] | Leo | Binderup, L. et al. Biochem Pharmacol 1991, 42(8): 1569. | EP 460032 |
| 911 | [chemical structure] | Micro- bial Chem- istry Re- search Founda- tion | Muraoka, Y. et al. 30th Intersci Conf Antimicrob Agents Chemother (Oct 21-24, Atlanta) 1990, Abst 801. | |
| 912 | [chemical structure] | Kyorin | | AU 9057029 |
| 913 | [chemical structure] | Green- wich Pharm. | | AU 9057691 |
| 914 | [chemical structure] | Leo | | EP 460032 |
| 915 | [chemical structure] | Leo | | EP 460032 |
| 916 | [chemical structure] | Leo | | EP 460032 |
| 917 | [chemical structure] | Leo | | EP 460032 |
| 918 | [chemical structure] | Leo | | EP 460032 |
| 919 | [chemical structure] | Leo | | EP 460032 |
| 920 | [chemical structure] | Leo | | EP 460032 |
| 921 | [chemical structure] | Novar- tis | Kricek, F. et al. Immuno- pharmacol- ogy 1997, 36(1): 27. | AU 9057875 |
| 922 | [chemical structure] | Amer- sham Health | 1) Frey, C. L. et al. 31st Intersci Conf Anti- microb Agents Chemother (Sept 29-Oct 2, Chicago) 1991, Abst 85. | AU 9059014 |
| 923 | [chemical structure] | Roche | | EP 384349 |
| 924 | [chemical structure] | Roche | | AU 9059154 |
| 925 | [chemical structure] | Kyorin | | AU 9057029 |
| 926 | [chemical structure] | Green- wich Pharm. | | AU 9057691 |
| 927 | [chemical structure] | Green- wich Pharm. | | AU 9057691 |
| 928 | [chemical structure] | Green- wich Pharm. | | AU 9057691 |
| 929 | [chemical structure] | Green- wich Pharm. | | AU 9057691 |
| 930 | [chemical structure] | Green- wich Pharm. | | AU 9057691 |
| 931 | [chemical structure] | Green- wich Pharm. | | AU 9057691 |
| 932 | [chemical structure] | Green- wich Pharm. | | AU 9057691 |
| 933 | [chemical structure] | Green- wich Pharm. | | AU 9057691 |
| 934 | [chemical structure] | Green- wich Pharm. | | AU 9057691 |
| 935 | [chemical structure] | Green- wich Pharm. | | AU 9057691 |
| 936 | [chemical structure] | Green- wich Pharm. | | AU 9057691 |
| 937 | [chemical structure] | Green- wich Pharm. | | AU 9057691 |
| 938 | [chemical structure] | Green- wich Pharm. | | AU 9057691 |
| 939 | [chemical structure] | Amer- sham Health | | AU 9059014 |
| 940 | [chemical structure] | Amer- sham Health | | AU 9059014 |
| 941 | [chemical structure] | Amer- sham Health | | AU 9059014 |
| 942 | [chemical structure] | Amer- sham Health | | AU 9059014 |
| 943 | [chemical structure] | Amer- sham Health | | AU 9059014 |
| 944 | [chemical structure] | Amer- sham Health | | AU 9059014 |
| 945 | [chemical structure] | Amer- sham Health | | AU 9059014 |
| 946 | [chemical structure] | Amer- sham Health | | AU 9059014 |
| 947 | [chemical structure] | Amer- sham Health | | AU 9059014 |
| 948 | [chemical structure] | Leo | 1) Elstner, E. et al. Blood 1994, 84(6): 1960. | 1) EP 479871 |
| 949 | [chemical structure] | Leo | | WO 9100855 |
| 950 | [chemical structure] | Roche | | AU 9059154 |
| 951 | [chemical structure] | Roche | | AU 9059154 |
| 952 | [chemical structure] | Roche | | AU 9059154 |
| 953 | [chemical structure] | Roche | | AU 9059154 |
| 954 | [chemical structure] | Roche | | AU 9059154 |
| 955 | [chemical structure] | Aller- gan | | U.S. Pat. No. 5013850 |
| 956 | [chemical structure] | Leo | | WO 9100855 |
| 957 | [chemical structure] | Leo | | WO 9100855 |
| 958 | [chemical structure] | Leo | | WO 9100855 |
| 959 | [chemical structure] | Leo | | WO 9100855 |
| 960 | [chemical structure] | Leo | | EP 479871 |
| 961 | [chemical structure] | Leo | | EP 479871 |
| 962 | [chemical structure] | Aller- gan | | U.S. Pat. No. 5013850 |
| 963 | [chemical structure] | Aller- gan | | U.S. Pat. No. 5013850 |
| 964 | [chemical structure] | Aller- gan | | U.S. Pat. No. 5013850 |
| 965 | [chemical structure] | Aller- gan | | U.S. Pat. No. 5013850 |
| 966 | [chemical structure] | Aller- gan | | U.S. Pat. No. 5013850 |
| 967 | [chemical structure] | Aller- gan | | U.S. Pat. No. 5013850 |
| 968 | [chemical structure] | Aller- gan | | U.S. Pat. No. 5013850 |
| 969 | [chemical structure] | Aller- gan | | U.S. Pat. No. 5013850 |
| 970 | [chemical structure] | Aller- gan | | U.S. Pat. No. 5013850 |
| 971 | [chemical structure] | Aller- gan | | U.S. Pat. No. 5013850 |
| 972 | [chemical structure] | Aller- gan | | U.S. Pat. No. 5013850 |
| 973 | [chemical structure] | Aller- gan | | U.S. Pat. No. 5013850 |
| 974 | [chemical structure] | Aller- gan | | U.S. Pat. No. 5013850 |
| 975 | [chemical structure] | Aller- gan | | U.S. Pat. No. 5013850 |
| 976 | [chemical structure] | Aller- gan | | U.S. Pat. No. 5013850 |
| 977 | [chemical structure] | Aller- gan | | U.S. Pat. No. 5013850 |
| 978 | [chemical structure] | Aller- gan | | U.S. Pat. No. 5013850 |
| 979 | [chemical structure] | New England Med. Center Hosp. | | WO 9116339 |
| 980 | [chemical structure] | Roche | 1) Hill, C. H. 6th SCI-RSC Med Chem Symp (Sept 8-11, Cam- bridge) 1991, Abst S18. | EP 384349 |
| 981 | [chemical structure] | New England Med. Center Hosp. | | WO 9116339 |
| 982 | [chemical structure] | Adler | | U.S. Pat. No. 5145842 |
| 983 | [chemical structure] | Adler | | U.S. Pat. No. 5145842 |
| 984 | [chemical structure] | Adler | | U.S. Pat. No. 5145842 |
| 985 | [chemical structure] | Adler | | U.S. Pat. No. 5145842 |
| 986 | [chemical structure] | Adler | | U.S. Pat. No. 5145842 |
| 987 | [chemical structure] | Adler | | U.S. Pat. No. 5145842 |
| 988 | [chemical structure] | Adler | | U.S. Pat. No. 5145842 |
| 989 | [chemical structure] | Adler | | U.S. Pat. No. 5145842 |
| 990 | [chemical structure] | Roche | | EP 510473 |
| 991 | [chemical structure] | Beau- four- Ipsen | 1) Carde, P. et al. Proc Amer Soc Clin Oncol 1991, 10: Abst 324. | AU 8810261 |
| 992 | [chemical structure] | Roche | | EP 510473 |
| 993 | [chemical structure] | Roche | | EP 510473 |
| 994 | [chemical structure] | Roche | | EP 510473 |
| 995 | [chemical structure] | Fuji- sawa | | WO 9218483 |
| 996 | [chemical structure] | Kyowa Hakko | | EP 526840 |
| 997 | [chemical structure] | Kyowa Hakko | | EP 526840 |
| 998 | [chemical structure] | Kyowa Hakko | | EP 526840 |
| 999 | [chemical structure] | Aventis Pharma | | EP 538783 |
| 1000 | [chemical structure] | Haya- shibara | 1) Yama- moto, I. et al. 18th Int Cong Chemother (June 27-July 2, Stockholm) 1993, Abst 516. | EP 539196 |
| 1001 | [chemical structure] | Kyowa Hakko | | WO 9312116 |
| 1002 | [chemical structure] | Glaxo Smith Kline | | WO 9314082 |
| 1003 | [chemical structure] | Otsuka | | JP 93132484 |
| 1004 | [chemical structure] | Pfizer | | U.S. Pat. No. 5236926 |
| 1005 | [chemical structure] | Aventis Pharma | | EP 538783 |
| 1006 | [chemical structure] | Aventis Pharma | | EP 538783 |
| 1007 | [chemical structure] | Glaxo Smith Kline | | WO 9314082 |
| 1008 | [chemical structure] | Glaxo Smith Kline | | WO 9314082 |
| 1009 | [chemical structure] | Glaxo Smith Kline | | WO 9314082 |
| 1010 | [chemical structure] | Glaxo Smith Kline | | WO 9314082 |
| 1011 | [chemical structure] | Glaxo Smith Kline | | WO 9314082 |
| 1012 | [chemical structure] | Glaxo Smith Kline | | WO 9314082 |
| 1013 | [chemical structure] | Otsuka | | JP 93132484 |
| 1014 | [chemical structure] | Otsuka | | JP 93132484 |
| 1015 | [chemical structure] | Otsuka | | JP 93132484 |
| 1016 | [chemical structure] | Otsuka | | JP 93132484 |
| 1017 | [chemical structure] | Otsuka | | JP 93132484 |
| 1018 | [chemical structure] | Pfizer | | U.S. Pat. No. 5236926 |
| 1019 | [chemical structure] | Pfizer | | U.S. Pat. No. 5236926 |
| 1020 | [chemical structure] | Pfizer | | U.S. Pat. No. 5236926 |
| 1021 | [chemical structure] | Pfizer | | U.S. Pat. No. 5236926 |
| 1022 | [chemical structure] | Pfizer | | U.S. Pat. No. 5236926 |
| 1023 | [chemical structure] | Sumi- tomo | | U.S. Pat. No. 5258396 |
| 1024 | [chemical structure] | Cell Thera- peutics | | WO 9411001 |
| 1025 | [chemical structure] | Green- wich Pharm. | | WO 9411381 |
| 1026 | [chemical structure] | Otsuka | | JP 94100561 |
| 1027 | [chemical structure] | Cell Thera- peutics | | WO 9411001 |
| 1028 | [chemical structure] | Cell Thera- peutics | | WO 9411001 |
| 1029 | [chemical structure] | Cell Thera- peutics | | WO 9411001 |
| 1030 | [chemical structure] | Cell Thera- peutics | | WO 9411001 |
| 1031 | [chemical structure] | Cell Thera- peutics | | WO 9411001 |
| 1032 | [chemical structure] | Cell Thera- peutics | | WO 9411001 |
| 1033 | [chemical structure] | Cell Thera- peutics | | WO 9411001 |
| 1034 | [chemical structure] | Green- wich Pharm. | | WO 9411381 |
| 1035 | [chemical structure] | Green- wich Pharm. | | WO 9411381 |
| 1036 | [chemical structure] | Green- wich Pharm. | | WO 9411381 |
| 1037 | [chemical structure] | Green- wich Pharm. | | WO 9411381 |
| 1038 | [chemical structure] | Green- wich Pharm. | | WO 9411381 |
| 1039 | [chemical structure] | Green- wich Pharm. | | WO 9411381 |
| 1040 | [chemical structure] | Green- wich Pharm. | | WO 9411381 |
| 1041 | [chemical structure] | Green- wich Pharm. | | WO 9411381 |
| 1042 | [chemical structure] | Green- wich Pharm. | | WO 9411381 |
| 1043 | [chemical structure] | Green- wich Pharm. | | WO 9411381 |
| 1044 | [chemical structure] | Green- wich Pharm. | | WO 9411381 |
| 1045 | [chemical structure] | Green- wich Pharm. | | WO 9411381 |
| 1046 | [chemical structure] | Bristol Tech- nol. | | GB 2278842 |
| 1047 | [chemical structure] | Otsuka | | JP 94100561 |
| 1048 | [chemical structure] | Otsuka | | JP 94100561 |
| 1049 | [chemical structure] | Otsuka | | JP 94100561 |
| 1050 | [chemical structure] | Otsuka | | JP 94100561 |
| 1051 | [chemical structure] | Otsuka | | JP 94100561 |
| 1052 | [chemical structure] | Otsuka | | JP 94100561 |
| 1053 | [chemical structure] | Otsuka | | JP 94100561 |
| 1054 | [chemical structure] | Otsuka | | JP 94100561 |
| 1055 | [chemical structure] | Otsuka | | JP 94100561 |
| 1056 | [chemical structure] | Otsuka | | JP 94100561 |
| 1057 | [chemical structure] | Abbott GmbH | | WO 9500507 |
| 1058 | [chemical structure] | Leo | | WO 9502577 |
| 1059 | [chemical structure] | Kyorin | Kono, Y. et al. 115th Annu Meet Pharmaceut Soc Jpn March 29-31, Sendai) 1995, Abst 30 (A3) 10-3. | EP 538477 |
| 1060 | [chemical structure] | Abbott GmbH | | WO 9500507 |
| 1061 | [chemical structure] | Abbott GmbH | | WO 9500507 |
| 1062 | [chemical structure] | Abbott GmbH | | WO 9500507 |
| 1063 | [chemical structure] | Kyowa Hakko | | WO 9509153 |
| 1064 | [chemical structure] | Bayer | | U.S. Pat. No. 5409932 |
| 1065 | [chemical structure] | Bayer | | U.S. Pat. No. 5411960 |
| 1066 | [chemical structure] | Baxter | France, C. P. et al. Drug Develop Res 1995, 35:49. | EP 396282 |
| 1067 | [chemical structure] | Bayer | | U.S. Pat. No. 5411960 |
| 1068 | [chemical structure] | Bayer | | U.S. Pat. No. 5411960 |
| 1069 | [chemical structure] | Bayer | | U.S. Pat. No. 5411960 |
| 1070 | [chemical structure] | Bayer | | U.S. Pat. No. 5411960 |
| 1071 | [chemical structure] | Bayer | | U.S. Pat. No. 5409932 |
| 1072 | [chemical structure] | Kyowa Hakko | | WO 9509153 |
| 1073 | [chemical structure] | Kyowa Hakko | | WO 9509153 |
| 1074 | [chemical structure] | Kyowa Hakko | | WO 9509153 |
| 1075 | [chemical structure] | Kyowa Hakko | | WO 9509153 |
| 1076 | [chemical structure] | Kyowa Hakko | | WO 9509153 |
| 1077 | [chemical structure] | Kyowa Hakko | | WO 9509153 |
| 1078 | [chemical structure] | Kyowa Hakko | | WO 9509153 |
| 1079 | [chemical structure] | Sanofi- Synthe- labo | | WO 9529672 |
| 1080 | [chemical structure] | Takeda | | WO 9535296 |
| 1081 | [chemical structure] | Vertex | | WO 9535308 |
| 1082 | [chemical structure] | Entro pin | | WO 9534561 |
| 1083 | [chemical structure] | Takeda | | WO 9535296 |
| 1084 | [chemical structure] | Takeda | | WO 9535296 |
| 1085 | [chemical structure] | Takeda | | WO 9535296 |
| 1086 | [chemical structure] | Takeda | | WO 9535296 |
| 1087 | [chemical structure] | Vertex | | WO 9535308 |
| 1088 | [chemical structure] | Vertex | | WO 9535308 |
| 1089 | [chemical structure] | Vertex | | WO 9535308 |
| 1090 | [chemical structure] | Sanofi- Synthe- labo | | WO 9529672 |
| 1091 | [chemical structure] | Sanofi- Synthe- labo | | WO 9529672 |
| 1092 | [chemical structure] | Sanofi- Synthe- labo | | WO 9529672 |
| 1093 | [chemical structure] | 3M Pharma- ceuti cals | | U.S. Pat. No. 5482936 |
| 1094 | [chemical structure] | 3M Pharma- ceuti cals | | U.S. Pat. No. 5482936 |
| 1095 | [chemical structure] | 3M Pharma- ceuti cals | | U.S. Pat. No. 5482936 |
| 1096 | [chemical structure] | 3M Pharma- ceuti cals | | U.S. Pat. No. 5482936 |
| 1097 | [chemical structure] | Entro- pin | | WO 9534561 |
| 1098 | [chemical structure] | Entro- pin | | WO 9534561 |
| 1099 | [chemical structure] | Entro- pin | | WO 9534561 |
| 1100 | [chemical structure] | Entro- pin | | WO 9534561 |
| 1101 | [chemical structure] | Entro- pin | | WO 9534561 |
| 1102 | [chemical structure] | Entro- pin | | WO 9534561 |
| 1103 | [chemical structure] | Entro- pin | | WO 9534561 |
| 1104 | [chemical structure] | Taisho | 1) Yoshida, H. et al. Biol Pharm Bull 1997, 20(1): 94. | JP 93051358 |
| 1105 | [chemical structure] | Sankyo | Shiozaki, M. et al. Tetrahedron Lett 1996 37(40): 7271. | |
| 1106 | [chemical structure] | Nippon Kayaku | | JP 96283290 |
| 1107 | [chemical structure] | Eisai | | EP 889032 |
| 1108 | [chemical structure] | AWD. pharma | | WO 9734874 |
| 1109 | [chemical structure] | AWD. pharma | | WO 9734874 |
| 1110 | [chemical structure] | AWD. pharma | | WO 9734874 |
| 1111 | [chemical structure] | Astra Zeneca | 1) Saem- strand, B. et al. J Pharm- acol Exp Ther 1999, 228(3): 1174. | EP 0463514 |
| 1112 | [chemical structure] | Eisai | Nagai, M. et al. 217th ACS Natl Meet (March 21-25, Ana- heim) 1999, Abst MEDI 050. | EP 889032 |
| 1113 | [chemical structure] | Bashkir Medical Univer- sity | Sadykov, R. F. et al. Naunyn- Schmied Arch Pharm- acol 1998, 358(1, Suppl. 2): Abst P 52.28. | |
| 1114 | [chemical structure] | Gruen- enthal | | EP 856513 |
| 1115 | [chemical structure] | Gruen- enthal | | EP 856513 |
| 1116 | [chemical structure] | Gruen- enthal | | EP 856513 |
| 1117 | [chemical structure] | Gruen- enthal | | EP 856513 |
| 1118 | [chemical structure] | Japan Energy | | JP 98231297 |
| 1119 | [chemical structure] | Japan Energy | | JP 98231297 |
| 1120 | [chemical structure] | Japan Energy | | JP 98231297 |
| 1121 | [chemical structure] | Japan Energy | | JP 98231297 |
| 1122 | [chemical structure] | Japan Energy | | JP 98231297 |
| 1123 | [chemical structure] | Celgene | 1) Moreira, A. L. et al. J Neuro- Oncol 1999, 43(2): 109. | U.S. Pat. No. 5463063 |
| 1124 | [chemical structure] | Celgene | | U.S. Pat. No. 5874448 |
| 1125 | [chemical structure] | Celgene | | U.S. Pat. No. 5874448 |
| 1126 | [chemical structure] | Celgene | | U.S. Pat. No. 5874448 |
| 1127 | [chemical structure] | Celgene | | U.S. Pat. No. 5874448 |
| 1128 | [chemical structure] | Celgene | | U.S. Pat. No. 5874448 |
| 1129 | [chemical structure] | Eisai | | EP 889032 |
| 1130 | [chemical structure] | Merck & Co. | | WO 9909984 |
| 1131 | [chemical structure] | Merck & Co. | | WO 9909984 |
| 1132 | [chemical structure] | Merck & Co. | | WO 9909984 |
| 1133 | [chemical structure] | Merck & Co. | | WO 9909984 |
| 1134 | [chemical structure] | Hokur- iku | | JP 99080156 |
| 1135 | [chemical structure] | Hokur- iku | | JP 99080156 |
| 1136 | [chemical structure] | Hokur- iku | | JP 99080156 |
| 1137 | [chemical structure] | Hokur- iku | | JP 99080156 |
| 1138 | [chemical structure] | Hokur- iku | | JP 99080156 |
| 1139 | [chemical structure] | SSP | | CA 2255337 |
| 1140 | [chemical structure] | SSP | | CA 2255337 |
| 1141 | [chemical structure] | SSP | | CA 2255337 |
| 1142 | [chemical structure] | Abbott | Madar, D. et al. 222nd ACS Natl Meet (Aug 26-30, Chicago) 2001, Abst MEDI 7. | EP 1068187 |
| 1143 | [chemical structure] | Active Biotech | | WO 9955678 |
| 1144 | [chemical structure] | Amer- sham | 1) Gesser, B. et al. Proc Natl Acad Sci USA 1997, 94(26): 14620. | WO 9601318 |
| 1145 | [chemical structure] | Kowa | | WO 9944995 |
| 1146 | [chemical structure] | Kowa | | WO 9944995 |
| 1147 | [chemical structure] | Kowa | | WO 9944995 |
| 1148 | [chemical structure] | OM Pharma | | WO 0000462 |
| 1149 | [chemical structure] | OM Pharma | | WO 0000462 |
| 1150 | [chemical structure] | Ono | | WO 0003980 |
| 1151 | [chemical structure] | Ono | | WO 0003980 |
| 1152 | [chemical structure] | Ono | | WO 0003980 |
| 1153 | [chemical structure] | Ono | | WO 0003980 |
| 1154 | [chemical structure] | Ono | | WO 0003980 |
| 1155 | [chemical structure] | Ono | | WO 0003980 |
| 1156 | [chemical structure] | Ono | | WO 0003980 |
| 1157 | [chemical structure] | Univer- sity of Bristol | | WO 0014114 |
| 1158 | [chemical structure] | Eisai | Hibi, S. et al. Bioorg Med Chem Lett 2000, 10(7): 623. | EP 0889032 |
| 1159 | [chemical structure] | Janssen | | WO 0021959 |
| 1160 | [chemical structure] | Janssen | | WO 0021959 |
| 1161 | [chemical structure] | Janssen | | WO 0021959 |
| 1162 | [chemical structure] | Janssen | | WO 0021959 |
| 1163 | [chemical structure] | Fuji- sawa | | WO 0021979 |
| 1164 | [chemical structure] | Abbott | 1) Liu, G. et al. 220th ACS Natl Meet (Aug 20-24, Washington DC) 2000, Abst MEDI 171. | 1) U.S. Pat. No. 6110922 |
| 1165 | [chemical structure] | Cancer Re- search UK | | WO 0052046 |
| 1166 | [chemical structure] | Cancer Re- search UK | | WO 0052046 |
| 1167 | [chemical structure] | Cancer Re- search UK | | WO 0052046 |
| 1168 | [chemical structure] | South- ern Re- search Institute | | WO 0112197 |
| 1169 | [chemical structure] | South- ern Re- search Institute | | WO 0112197 |
| 1170 | [chemical structure] | Abbott Labs. | | EP 1068187 |
| 1171 | [chemical structure] | Abbott | | EP 1068187 |
| 1172 | [chemical structure] | Abbott | | EP 1068187 |
| 1173 | [chemical structure] | Fuji- sawa | Spears, G. et al. 21st Symp Med Chem (Nov 28-30, Kyoto) 2001, Abst 2P-29. | |
| 1174 | [chemical structure] | Austin Re- search Institute | Tselios, T. et al. J Med Chem 2002, 45(2): 275. | |
| 1175 | [chemical structure] | Eukar- ion | | WO 0204454 |
| 1176 | [chemical structure] | Nobex | 1) Riggs- Sauthier, J. A. et al. 224th ACS Natl Meet (Aug 18-22, Boston) 2002, Abst MEDI 305. | WO 0218324 |
| 1177 | [chemical structure] | Tularik | | WO 0238107 |
| 1178 | [chemical structure] | Tularik | | WO 0238107 |
| 1179 | [chemical structure] | Tularik | | WO 0238107 |
| 1180 | [chemical structure] | Tularik | | WO 0238107 |
| 1181 | [chemical structure] | Tularik | | WO 0238107 |
| 1182 | [chemical structure] | Tularik | | WO 0238107 |
| 1183 | [chemical structure] | Tularik | | WO 0238107 |
| 1184 | [chemical structure] | Tularik | | WO 0238107 |
| 1185 | [chemical structure] | Tularik | | WO 0238107 |
| 1186 | [chemical structure] | Sanofi- Synthe labo | | WO 0242269 |
| 1187 | [chemical structure] | Sanofi- Synthe labo | | WO 0242269 |
| 1188 | [chemical structure] | Sanofi- Synthe labo | | WO 0242269 |
| 1189 | [chemical structure] | Sanofi- Synthe labo | | WO 0242269 |
| 1190 | [chemical structure] | Sanofi- Synthe labo | | WO 0242269 |
| 1191 | [chemical structure] | Sanofi- Synthe labo | | WO 0242269 |
| 1192 | [chemical structure] | Sanofi- Synthe labo | | WO 0242269 |
| 1193 | [chemical structure] | Sanofi- Synthe labo | | WO 0242269 |
| 1194 | [chemical structure] | Sanofi- Synthe labo | | WO 0242269 |
| 1195 | [chemical structure] | Cell Thera- peutics | | WO 0268421 |
| 1196 | [chemical structure] | Cell Thera- peutics | | WO 0268421 |
| 1197 | [chemical structure] | Sumi- tomo Pharma- ceuti cals | | EP 248399 |
| 1198 | [chemical structure] | Aventis Pharma | | EP 248734 |
| 1199 | [chemical structure] | Sumi- tomo Pharma- ceuti cals | | EP 248399 |
| 1200 | [chemical structure] | Sumi- tomo Pharma- ceuti cals | | EP 248399 |
| 1201 | [chemical structure] | Sumi- tomo Pharma- ceuti cals | | EP 248399 |
| 1202 | [chemical structure] | Sumi- tomo Pharma- ceuti cals | | EP 248399 |
| 1203 | [chemical structure] | Sumi- tomo Pharma- ceuti cals | | EP 248399 |
| 1204 | [chemical structure] | Sumi- tomo Pharma- ceuti cals | | EP 248399 |
| 1205 | [chemical structure] | Sumi- tomo Pharma- ceuti cals | | EP 248399 |
| 1206 | [chemical structure] | Sumi- tomo Pharma- ceuti cals | | EP 248399 |
| 1207 | [chemical structure] | Aventis Pharma | | EP 248734 |
| 1208 | [chemical structure] | Aventis Pharma | | EP 248734 |
| 1209 | [chemical structure] | Aventis Pharma | | EP 248734 |
| 1210 | [chemical structure] | Aventis Pharma | | EP 248734 |
| 1211 | [chemical structure] | Aventis Pharma | | EP 248734 |
| 1212 | [chemical structure] | Aventis Pharma | | EP 248734 |
| 1213 | [chemical structure] | Pfizer | | AU 8783281 |
| 1214 | [chemical structure] | Harbor Branch Found. | | U.S. Pat. No. 4755529 |
| 1215 | [chemical structure] | Roche Bio- science | | AU 8782540 |
| 1216 | [chemical structure] | Roche Bio- science | | AU 8782540 |
| 1217 | [chemical structure] | Roche Bio- science | | AU 8782540 |
| 1218 | [chemical structure] | Roche Bio- science | | AU 8782540 |
| 1219 | [chemical structure] | Novar- tis | | EP 296110 |
| 1220 | [chemical structure] | Novar- tis | 1) Lam, C. et al. Antimicrob Agents Chemother 1991, 35(3): 500. | AU 8822785 |
| 1221 | [chemical structure] | Scher- ing- Plough | | EP 318214 |
| 1222 | [chemical structure] | Novar- tis | | AU 8822785 |
| 1223 | [chemical structure] | Novar- tis | | AU 8822785 |
| 1224 | [chemical structure] | Novar- tis | | EP 296110 |
| 1225 | [chemical structure] | Novar- tis | | EP 296110 |
| 1226 | [chemical structure] | Novar- tis | | EP 296110 |
| 1227 | [chemical structure] | Scher- ing- Plough | | EP 318214 |
| 1228 | [chemical structure] | Leo | | WO 8910351 |
| 1229 | [chemical structure] | Leo | | WO 8910351 |
| 1230 | [chemical structure] | Leo | | WO 8910351 |
| 1231 | [chemical structure] | Leo | | WO 8910351 |
| 1232 | [chemical structure] | Leo | | WO 8910351 |
| 1233 | [chemical structure] | Leo | | WO 8910351 |
| 1234 | [chemical structure] | Leo | | WO 8910351 |
| 1235 | [chemical structure] | Tanabe Seiyaku | 1) Ueno, M. et al. Jpn J Pharmacol 1992, 58 (Suppl. 1): Abst O-210. | AU 8942368 |
| 1236 | [chemical structure] | Green- wich Pharm. | | AU 9047648 |
| 1237 | [chemical structure] | Green- wich Pharm. | | AU 9047648 |
| 1238 | [chemical structure] | Aventis Pharma | | EP 378456 |
| 1239 | [chemical structure] | Aventis Pharma | | EP 378456 |
| 1240 | [chemical structure] | Roche | | EP 384349 |
| 1241 | [chemical structure] | SPA | | EP 421074 |
| 1242 | [chemical structure] | Hitachi Chemi- cal | | EP 421682 |
| 1243 | [chemical structure] | Fuji- sawa | 1) Manda, T. et al. Jpn J Pharmacol 1997, 73 (Suppl. 1): Abst P-140. | EP 412404 |
| 1244 | [chemical structure] | Leo | | WO 9109841 |
| 1245 | [chemical structure] | Hitachi Chemi- cal | | EP 421682 |
| 1246 | [chemical structure] | Hitachi Chemi- cal | | EP 421682 |
| 1247 | [chemical structure] | Hitachi Chemi- cal | | EP 421682 |
| 1248 | [chemical structure] | Hitachi Chemi- cal | | EP 421682 |
| 1249 | [chemical structure] | Hitachi Chemi- cal | | EP 421682 |
| 1250 | [chemical structure] | Hitachi Chemi- cal | | EP 421682 |
| 1251 | [chemical structure] | Hitachi Chemi- cal | | EP 421682 |
| 1252 | [chemical structure] | Hitachi Chemi- cal | | EP 421682 |
| 1253 | [chemical structure] | SPA | | EP 421074 |
| 1254 | [chemical structure] | SPA | | EP 421074 |
| 1255 | [chemical structure] | SPA | | EP 421074 |
| 1256 | [chemical structure] | SPA | | EP 421074 |
| 1257 | [chemical structure] | SPA | | EP 421074 |
| 1258 | [chemical structure] | SPA | | EP 421074 |
| 1259 | [chemical structure] | SPA | | EP 421074 |
| 1260 | [chemical structure] | SPA | | EP 421074 |
| 1261 | [chemical structure] | SPA | | EP 421074 |
| 1262 | [chemical structure] | SPA | | EP 421074 |
| 1263 | [chemical structure] | SPA | | EP 421074 |
| 1264 | [chemical structure] | SPA | | EP 421074 |
| 1265 | [chemical structure] | SPA | | EP 421074 |
| 1266 | [chemical structure] | SPA | | EP 421074 |
| 1267 | [chemical structure] | SPA | | EP 421074 |
| 1268 | [chemical structure] | SPA | | EP 421074 |
| 1269 | [chemical structure] | Leo | | EP 506794 |
| 1270 | [chemical structure] | Fiji- sawa | | WO 9119708 |
| 1271 | [chemical structure] | Harbor Branch Found. | | U.S. Pat. No. 5091368 |
| 1272 | [chemical structure] | Aventis Pharma | | EP 476658 |
| 1273 | [chemical structure] | Merck & Co. | | EP 480713 |
| 1274 | [chemical structure] | Aventis Pharma | | EP 476658 |
| 1275 | [chemical structure] | Aventis Pharma | | EP 476658 |
| 1276 | [chemical structure] | Aventis Pharma | | EP 476658 |
| 1277 | [chemical structure] | Aventis Pharma | | EP 476658 |
| 1278 | [chemical structure] | Aventis Pharma | | EP 476658 |
| 1279 | [chemical structure] | Aventis Pharma | | EP 476658 |
| 1280 | [chemical structure] | Aventis Pharma | | EP 476658 |
| 1281 | [chemical structure] | Aventis Pharma | | EP 476658 |
| 1282 | [chemical structure] | Harbor Branch Found. | | U.S. Pat. No. 5091368 |
| 1283 | [chemical structure] | Merck & Co. | | EP 480713 |
| 1284 | [chemical structure] | Merck & Co. | | EP 480713 |
| 1285 | [chemical structure] | Merck & Co. | | EP 480713 |
| 1286 | [chemical structure] | Merck & Co. | | EP 480713 |
| 1287 | [chemical structure] | Kyowa Hakko | Miwa, K. et al. 113th Annu Meet Pharmaceut Soc Jpn (March 29-31, Osaka) 1993, Abst 30CC 13-1. | EP 505058 |
| 1288 | [chemical structure] | Fuji- sawa | Nakamura, K. et al. Chem Pharm Bull 1993, 41(5): 894. | AU 8783152 |
| 1289 | [chemical structure] | Wyeth | | U.S. Pat. No. 5312831 |
| 1290 | [chemical structure] | Wyeth | | U.S. Pat. No. 5312831 |
| 1291 | [chemical structure] | Wyeth | | U.S. Pat. No. 5312831 |
| 1292 | [chemical structure] | Cell Thera- peutics | | WO 9416704 |
| 1293 | [chemical structure] | Immu- nex | 1) Immunex Corporation Press Release 1994, July 21. | WO 9506031 |
| 1294 | [chemical structure] | Cell Thera- peutics | | WO 9416704 |
| 1295 | [chemical structure] | Cell Thera- peutics | | WO 9416704 |
| 1296 | [chemical structure] | Cell Thera- peutics | | WO 9416704 |
| 1297 | [chemical structure] | Cell Thera- peutics | | WO 9416704 |
| 1298 | [chemical structure] | Cell Thera- peutics | | WO 9416704 |
| 1299 | [chemical structure] | Cell Thera- peutics | | WO 9416704 |
| 1300 | [chemical structure] | Cell Thera- peutics | | WO 9416704 |
| 1301 | [chemical structure] | Abbott GmbH | | WO 9500493 |
| 1302 | [chemical structure] | Glaxo- Smith Kline | | WO 9504734 |
| 1303 | [chemical structure] | Abbott GmbH | | WO 9500493 |
| 1304 | [chemical structure] | Abbott GmbH | | WO 9500493 |
| 1305 | [chemical structure] | Abbott GmbH | | WO 9500493 |
| 1306 | [chemical structure] | Abbott GmbH | | WO 9500493 |
| 1307 | [chemical structure] | Abbott GmbH | | WO 9500493 |
| 1308 | [chemical structure] | Abbott GmbH | | WO 9500493 |
| 1309 | [chemical structure] | Abbott GmbH | | WO 9500493 |
| 1310 | [chemical structure] | Abbott GmbH | | WO 9500493 |
| 1311 | [chemical structure] | Abbott GmbH | | WO 9500493 |
| 1312 | [chemical structure] | Abbott GmbH | | WO 9500493 |
| 1313 | [chemical structure] | Abbott GmbH | | WO 9500493 |
| 1314 | [chemical structure] | Sanofi- Synthe- labo | | EP 644197 |
| 1315 | [chemical structure] | Sanofi- Synthe- labo | | CA 2125021 |
| 1316 | [chemical structure] | Glaxo Smith Kline | | WO 9504734 |
| 1317 | [chemical structure] | Glaxo Smith Kline | | WO 9504734 |
| 1318 | [chemical structure] | Glaxo Smith Kline | | WO 9504734 |
| 1319 | [chemical structure] | Glaxo Smith Kline | | WO 9504734 |
| 1320 | [chemical structure] | Glaxo Smith Kline | | WO 9504734 |
| 1321 | [chemical structure] | Glaxo Smith Kline | | WO 9504734 |
| 1322 | [chemical structure] | Japan Tobac- co | | JP 95002779 |
| 1323 | [chemical structure] | Pharma- cia | 1) Gozzi, P. et al. J Pharmacol Exp Ther 1999, 291(1): 199. | JP 1995501330 |
| 1324 | [chemical structure] | Sanofi- Synthe- labo | | EP 644197 |
| 1325 | [chemical structure] | Sanofi- Synthe- labo | | EP 644197 |
| 1326 | [chemical structure] | Sanofi- Synthe- labo | | EP 644197 |
| 1327 | [chemical structure] | Sanofi- Synthe- labo | | CA 212021 |
| 1328 | [chemical structure] | Sanofi- Synthe- labo | | CA 212021 |
| 1329 | [chemical structure] | Sanofi- Synthe- labo | | CA 212021 |
| 1330 | [chemical structure] | Sanofi- Synthe- labo | | CA 212021 |
| 1331 | [chemical structure] | Sanofi- Synthe- labo | | CA 212021 |
| 1332 | [chemical structure] | Sanofi- Synthe- labo | | CA 212021 |
| 1333 | [chemical structure] | Sanofi- Synthe- labo | | CA 212021 |
| 1334 | [chemical structure] | Lilly | | WO 9517382 |
| 1335 | [chemical structure] | Millen- nium | | WO 9518610 |
| 1336 | [chemical structure] | Aventis Pharma | | WO 9520578 |
| 1337 | [chemical structure] | Cell Thera- peutics | | WO 9522546 |
| 1338 | [chemical structure] | Lilly | | WO 9517382 |
| 1339 | [chemical structure] | Lilly | | WO 9517382 |
| 1340 | [chemical structure] | Lilly | | WO 9517382 |
| 1341 | [chemical structure] | Lilly | | WO 9517382 |
| 1342 | [chemical structure] | Lilly | | WO 9517382 |
| 1343 | [chemical structure] | Lilly | | WO 9517382 |
| 1344 | [chemical structure] | Lilly | | WO 9517382 |
| 1345 | [chemical structure] | Lilly | | WO 9517382 |
| 1346 | [chemical structure] | Lilly | | WO 9517382 |
| 1347 | [chemical structure] | Lilly | | WO 9517382 |
| 1348 | [chemical structure] | Cyto Med | | WO 9518610 |
| 1349 | [chemical structure] | Cyto Med | | WO 9518610 |
| 1350 | [chemical structure] | Cyto Med | | WO 9518610 |
| 1351 | [chemical structure] | Cyto Med | | WO 9518610 |
| 1352 | [chemical structure] | Cyto Med | | WO 9518610 |
| 1353 | [chemical structure] | Cyto Med | | WO 9518610 |
| 1354 | [chemical structure] | Cyto Med | | WO 9518610 |
| 1355 | [chemical structure] | Cyto Med | | WO 9518610 |
| 1356 | [chemical structure] | Cyto Med | | WO 9518610 |
| 1357 | [chemical structure] | Cyto Med | | WO 9518610 |
| 1358 | [chemical structure] | Cyto Med | | WO 9518610 |
| 1359 | [chemical structure] | Cyto Med | | WO 9518610 |
| 1360 | [chemical structure] | Cyto Med | | WO 9518610 |
| 1361 | [chemical structure] | Cyto Med | | WO 9518610 |
| 1362 | [chemical structure] | Cyto Med | | WO 9518610 |
| 1363 | [chemical structure] | Cyto Med | | WO 9518610 |
| 1364 | [chemical structure] | Cyto Med | | WO 9518610 |
| 1365 | [chemical structure] | Cyto Med | | WO 9518610 |
| 1366 | [chemical structure] | Duphar | | EP 664287 |
| 1367 | [chemical structure] | Japan Tobac- co | | JP 95002779 |
| 1368 | [chemical structure] | Japan Tobac- co | | JP 95002779 |
| 1369 | [chemical structure] | Japan Tobac- co | | JP 95002779 |
| 1370 | [chemical structure] | Japan Tobac- co | | JP 95002779 |
| 1371 | [chemical structure] | Japan Tobac- co | | JP 95002779 |
| 1372 | [chemical structure] | Japan Tobac- co | | JP 95002779 |
| 1373 | [chemical structure] | Japan Tobac- co | | JP 95002779 |
| 1374 | [chemical structure] | Japan Tobac- co | | JP 95002779 |
| 1375 | [chemical structure] | Aventis Pharma | | WO 9520578 |
| 1376 | [chemical structure] | Aventis Pharma | | WO 9520578 |
| 1377 | [chemical structure] | Aventis Pharma | | WO 9520578 |
| 1378 | [chemical structure] | Aventis Pharma | | WO 9520578 |
| 1379 | [chemical structure] | Sanofi- Synthe- labo | | WO 9526958 |
| 1380 | [chemical structure] | Cell Thera- peutics | | WO 9522546 |
| 1381 | [chemical structure] | Cell Thera- peutics | | WO 9522546 |
| 1382 | [chemical structure] | Cell Thera- peutics | | WO 9522546 |
| 1383 | [chemical structure] | Cell Thera- peutics | | WO 9522546 |
| 1384 | [chemical structure] | Cell Thera- peutics | | WO 9522546 |
| 1385 | [chemical structure] | Cell Thera- peutics | | WO 9522546 |
| 1386 | [chemical structure] | Duphar | | EP 664287 |
| 1387 | [chemical structure] | Duphar | | EP 664287 |
| 1388 | [chemical structure] | Duphar | | EP 664287 |
| 1389 | [chemical structure] | Duphar | | EP 664287 |
| 1390 | [chemical structure] | Duphar | | EP 664287 |
| 1391 | [chemical structure] | Duphar | | EP 664287 |
| 1392 | [chemical structure] | Sanofi- Synthe- labo | | WO 9526958 |
| 1393 | [chemical structure] | Sanofi- Synthe- labo | | WO 9526958 |
| 1394 | [chemical structure] | Daikin | | EP 711766 |
| 1395 | [chemical structure] | Sanofi- Synthe- labo | | WO 9533751 |
| 1396 | [chemical structure] | Ajino- moto | | U.S. Pat. No. 5464918 |
| 1397 | [chemical structure] | Ajino- moto | | U.S. Pat. No. 5464918 |
| 1398 | [chemical structure] | Ajino- moto | | U.S. Pat. No. 5464918 |
| 1399 | [chemical structure] | Ajino- moto | | U.S. Pat. No. 5464918 |
| 1400 | [chemical structure] | Sanofi- Synthe- labo | | WO 9533751 |
| 1401 | [chemical structure] | Sanofi- Synthe- labo | | WO 9533751 |
| 1402 | [chemical structure] | Sanofi- Synthe- labo | | WO 9533751 |
| 1403 | [chemical structure] | Sanofi- Synthe- labo | | WO 9533751 |
| 1404 | [chemical structure] | Sanofi- Synthe- labo | | WO 9533751 |
| 1405 | [chemical structure] | Sanofi- Synthe- labo | | WO 9533751 |
| 1406 | [chemical structure] | Daikin | | EP 711766 |
| 1407 | [chemical structure] | Daikin | | EP 711766 |
| 1408 | [chemical structure] | Daikin | | EP 711766 |
| 1409 | [chemical structure] | Daikin | | EP 711766 |
| 1410 | [chemical structure] | Micro- bial Chem- istry Re- search Founda- tion | | JP 96176157 |
| 1411 | [chemical structure] | Tanabe | | WO 9640641 |
| 1412 | [chemical structure] | Tanabe | | WO 9640641 |
| 1413 | [chemical structure] | Daiichi Pharma- ceutical | 1) Kawagoe, K. et al. AFMC Int Med Chem Symp (Sept 3-8, Tokyo) 1995, Abst P13M183. | JP 97059236 |
| 1414 | [chemical structure] | Vertex | | WO 9722618 |
| 1415 | [chemical structure] | Vertex | | WO 9722618 |
| 1416 | [chemical structure] | Vertex | | WO 9722618 |
| 1417 | [chemical structure] | Vertex | | WO 9722618 |
| 1418 | [chemical structure] | Vertex | | WO 9722618 |
| 1419 | [chemical structure] | Vertex | | WO 9722618 |
| 1420 | [chemical structure] | Astra Zeneca | | WO 9731023 |
| 1421 | [chemical structure] | Univer- sity of Penn- sylvania | | WO 9733603 |
| 1422 | [chemical structure] | Astra Zeneca | | WO 9731023 |
| 1423 | [chemical structure] | Astra Zeneca | | WO 9731023 |
| 1424 | [chemical structure] | Astra Zeneca | | WO 9731023 |
| 1425 | [chemical structure] | Astra Zeneca | | WO 9731023 |
| 1426 | [chemical structure] | Leo | | WO 9737972 |
| 1427 | [chemical structure] | Taisho | | JP 97194476 |
| 1428 | [chemical structure] | Leo | | WO 9737972 |
| 1429 | [chemical structure] | Leo | | WO 9737972 |
| 1430 | [chemical structure] | Leo | | WO 9737972 |
| 1431 | [chemical structure] | Leo | | WO 9737972 |
| 1432 | [chemical structure] | Leo | | WO 9737972 |
| 1433 | [chemical structure] | Glaxo- Smith Kline | | WO 9743250 |
| 1434 | [chemical structure] | Pharm- acia | | WO 9745409 |
| 1435 | [chemical structure] | Pharm- acia | | WO 9745409 |
| 1436 | [chemical structure] | Pharm- acia | | WO 9745409 |
| 1437 | [chemical structure] | Pharm- acia | | WO 9745409 |
| 1438 | [chemical structure] | LEK | | EP 477912 |
| 1439 | [chemical structure] | Astra Zeneca | | WO 9828275 |
| 1440 | [chemical structure] | Astra Zeneca | | WO 9828275 |
| 1441 | [chemical structure] | Astra Zeneca | | WO 9828270 |
| 1442 | [chemical structure] | Astra Zeneca | | WO 9828270 |
| 1443 | [chemical structure] | Astra Zeneca | | WO 9828270 |
| 1444 | [chemical structure] | Astra Zeneca | | WO 9828270 |
| 1445 | [chemical structure] | Astra Zeneca | | WO 9828270 |
| 1446 | [chemical structure] | Astra Zeneca | | WO 9828270 |
| 1447 | [chemical structure] | Astra Zeneca | | WO 9828270 |
| 1448 | [chemical structure] | Astra Zeneca | | WO 9828270 |
| 1449 | [chemical structure] | Astra Zeneca | | WO 9828270 |
| 1450 | [chemical structure] | Astra Zeneca | | WO 9828270 |
| 1451 | [chemical structure] | Astra Zeneca | | WO 9828270 |
| 1452 | [chemical structure] | Astra Zeneca | | WO 9828270 |
| 1453 | [chemical structure] | Astra Zeneca | | WO 9828270 |
| 1454 | [chemical structure] | Astra Zeneca | | WO 9828270 |
| 1455 | [chemical structure] | Astra Zeneca | | WO 9828270 |
| 1456 | [chemical structure] | Astra Zeneca | | WO 9828270 |
| 1457 | [chemical structure] | Astra Zeneca | | WO 9828270 |
| 1458 | [chemical structure] | Astra Zeneca | | WO 9828270 |
| 1459 | [chemical structure] | Daiichi Pharma- ceutical | Koiwa, T. et al. J Antibiot 1999, 52(2): 198. | |
| 1460 | [chemical structure] | Bristol- Myers Squibb | | WO 0244181 |
| 1461 | [chemical structure] | Bristol- Myers Squibb | | WO 0244181 |
| 1462 | [chemical structure] | Bristol- Myers Squibb | | WO 0244181 |
| 1463 | [chemical structure] | Bristol- Myers Squibb | | WO 0244181 |
| 1464 | [chemical structure] | Bristol- Myers Squibb | | WO 0244181 |
| 1465 | [chemical structure] | Bristol- Myers Squibb | | WO 0244181 |
| 1466 | [chemical structure] | Bristol- Myers Squibb | | WO 0244181 |
| 1467 | [chemical structure] | Bristol- Myers Squibb | | WO 0244181 |
| 1468 | [chemical structure] | Bristol- Myers Squibb | | WO 0244181 |
| 1469 | [chemical structure] | Gruen- enthal | | WO 0290317 |

1. An isolated polypeptide of the SARS virus.

2. The polypeptide of claim 1, wherein the polypeptide is a Spike (S) polypeptide, an Env (E) polypeptide, a Membrane (M) polypeptide, a hemagglutinin-esterase polypeptide (HE), a nucleocapsid (N) polypeptide, a ORF1a polypeptide, a ORF1ab polypeptide, a proteolytic fragment of a ORF1a polypeptide, or a proteolytic fragment of a ORF1ab polypeptide.

3. The polypeptide of claim 1, wherein the polypeptide comprises an amino acid sequence selected from the group consisting of SEQ ID NOS: 6039, 7232, 9766, 9767, 9768, 9769, 9770, 9771, 9772, 9773, 9774, 9775, 9776, 9777, 9778, 9779, 6042, 6043, 6044, 6045, 6046, 6047, 6048, 6049, 6050 or 6052.

4. The polypeptide of claim 1, wherein the polypeptide comprises an amino acid sequence having >75% sequence identity to an amino acid sequence selected from the group consisting of SEQ ID NOS: 6042, 6043, 6044, 6045, 6046, 6047, 6048, 6049, 6050, 6052, 9766, 9767, 9768, 9769, 9770, 9771, 9772, 9773, 9774, 9775, 9776, 9777, 9778, 9779, 9997, 9998, 10149, 10316, 10338, 10339, 10340, 10341, 10342, 10532, 10533, 10571, 10572, 10573, 10574, 10575, 10576, 10577, 10578, 10579, 11561, 11562, 11618, 11619, 11620, 11627, 11630, 11633 & 11636.

5. The polypeptide of claim 1, wherein the polypeptide comprises a fragment of at least 10 consecutive amino acids of an amino acid sequence selected from the group consisting of SEQ ID NOS: 6042, 6043, 6044, 6045, 6046, 6047, 6048, 6049, 6050, 6052, 9766, 9767, 9768, 9769, 9770, 9771, 9772, 9773, 9774, 9775, 9776, 9777, 9778, 9779, 9997, 9998, 10149, 10316, 10338, 10339, 10340, 10341, 10342, 10532, 10533, 10571, 10572, 10573, 10574, 10575, 10576, 10577, 10578, 10579, 11552, 11561, 11562, 11618, 11619, 11620, 11627, 11630, 11633 & 11636.

6. A polypeptide comprising an amino acid sequence having >80% sequence identity to an amino acid sequence selected from the group consisting of SEQ ID NOS: 6042, 6043, 6044, 6045, 6046, 6047, 6048, 6049, 6050, 6052, 9766, 9767, 9768, 9769, 9770, 9771, 9772, 9773, 9774, 9775, 9776, 9777, 9778, 9779, 9997, 9998, 10149, 10316, 10338, 10339, 10340, 10341, 10342, 10532, 10533, 10571, 10572, 10573, 10574, 10575, 10576, 10577, 10578, 10579, 11552, 11561, 11562, 11618, 11619, 11620, 11627, 11630, 11633 & 11636.

7. A polypeptide comprising an amino acid sequence that comprises a fragment of at least 10 consecutive amino acids of an amino acid sequence selected from the group consisting SEQ ID NOS: 6042, 6043, 6044, 6045, 6046, 6047, 6048, 6049, 6050, 6052, 9766, 9767, 9768, 9769, 9770, 9771, 9772, 9773, 9774, 9775, 9776, 9777, 9778, 9779, 9997, 9998, 10149, 10316, 10338, 10339, 10340, 10341, 10342, 10532, 10533, 10571, 10572, 10573, 10574, 10575, 10576, 10577, 10578, 10579, 11552, 11561, 11562, 11618, 11619, 11620, 11627, 11630, 11633 & 11636.

8. A polypeptide comprising an amino acid sequence having >80% sequence identity to SEQ ID NO: 6042, and/or comprising an amino acid sequence that comprises a fragment of at least 10 consecutive amino acids of SEQ ID NO: 6042, wherein the polypeptide is in the form of a trimer.

9. Nucleic acid encoding the polypeptide of any one of claims 1 to 8.

10. Nucleic acid according to claim 9, comprising a nucleotide sequence selected from the group consisting of SEQ ID NOS: 7191, 7273, 7275, 7277, 7279, 7281, 7283, 7285, 7287, 7289, 7291, 7292, 7293, 9968, 10066, 10084, 10299, 10505, 11323, 11563, 11639 & 11640.

11. A polynucleotide comprising a nucleotide sequence having >80% sequence identity to the nucleic acid of claim 9 or claim 10.

12. A polynucleotide comprising a fragment of at least 10 consecutive nucleotides of the nucleic acid of claim 9 or claim 10.

13. Antibody that recognizes the polypeptide of any one of claim 1 to 8.

14. The antibody of claim 13, wherein said antibody recognizes the polypeptide comprising the amino acid sequence of SEQ ID NO: 6042 or a fragment thereof.

15. The antibody of claim 14, wherein said antibody recognizes the polypeptide comprising the amino acid sequence of SEQ ID NO: 6042 or a fragment thereof in trimeric form.

16. The antibody of claim 13, wherein the antibody is a monoclonal antibody.

17. The antibody of claim 13, wherein the antibody is a human antibody.

18. An immunoassay for detecting a SARS virus antigen in a sample, comprising the step of contacting the sample with the antibody of any one of claims 13 to 17.

19. An immunoassay for detecting an antibody against a SARS virus antigen in a sample, comprising the step of contacting the sample with the polypeptide of any one of claims 1 to 8.

20. A method of detecting an antibody against a SARS virus antigen in a sample comprising contacting said sample with the polypeptide of any one of claims 1 to 8, under conditions suitable for binding said polypeptide to said antibody, if present, and detecting the binding of said polypeptide to said antibody.

21. A method for detecting a SARS virus antigen in a sample comprising contacting said sample with the antibody of any one of claims 13 to 17, under conditions suitable for binding said antibody to said antigen, if present, and detecting the binding of said antibody to said antigen.

22. A vaccine for the treatment or prevention of severe acute respiratory syndrome (SARS), comprising an inactivated SARS virus, a killed SARS virus, an attenuated SARS virus, a split SARS virus preparation, or at least one purified SARS virus antigens.

23. The vaccine of claim 22, comprising a purified polypeptide according to any one of claims 1 to 8.

24. The vaccine of claim 22 or claim 23, wherein the antigen is a purified SARS virus antigen in the form of a VLP.

25. The vaccine of any one of claims 22 to 24, further comprising an adjuvant.

26. The vaccine of claim 25, wherein the adjuvant is an aluminium salt or is MF59.

27. The vaccine of any one of claims 22 to 26, comprising more than one SARS virus antigen.

28. The vaccine of claim 27, wherein the antigens are selected from S, E, N and M.

29. The vaccine of claim 22, comprising an inactivated SARS virus.

30. The vaccine of claim 29, wherein said virus is inactivated by chemical or physical means.

31. The vaccine of claim 30, wherein said inactivation comprises treatment of the virus with an effective amount of one or more of the following agents selected from the group consisting of detergents, formaldehyde, formalin, β-propriolactone, and UV light.

32. The vaccine of claim 30, wherein said inactivation comprises treatment of the virus with an effective amount of one or more of the following agents selected from the group consisting of methylene blue, psoralen and carboxyfullerene (C60).

33. The vaccine of claim 30, wherein said inactivation comprises treatment of the virus with an effective amount of one or more of the following agents selected from the group consisting of binary ethylamine, acetyl ethyleneimine and gamma irradiation.

34. The vaccine of claim 31, wherein said inactivation comprises treatment with β-propriolactone.

35. The vaccine of claim 34, wherein said β-propriolactone is used at a concentration of 0.01 to 0.5%.

36. The vaccine of claim 34, wherein said β-propriolactone is used at a concentration of 0.5 to 0.2%.

37. The vaccine of claim 34, wherein said β-propriolactone is used at a concentration of 0.025 to 0.1%.

38. A method of inactivating SARS virus comprising exposing the virus to an inactivation agent for 12 to 24 hours at refrigeration temperatures followed hydrolysis of any residual inactivating agent by elevating the temperature for three hours.

39. The method of claim 38, wherein the inactivation agent is β-propriolactone.

40. The method of claim 38, wherein the refrigeration temperature is between 0° C. and 8° C.

41. The method of claim 38, wherein the elevated temperature is between 33° C. and 41° C.

42. A method for making an inactivated SARS vaccine comprising:
a. innoculating a mammalian cell culture with SARS virus;
b. cultivating the infected cells;
c. harvesting SARS virus containing supernatant;
d. inactivating the SARS virus; and
e. purifying the inactivated SARS virus.

43. The method of claim 42, wherein said mammalian cell culture is derived from one or more of the cell types selected from the group consisting of fibroblast cells, endothelial cells, hepatocytes, keratinocytes, immune cells, mammary cells, smooth muscle cells, melanocyte cells, neural cells, prostate cells, renal cells, skeletal cells, liver cells, retinoblast cells and stromal cells.

44. The method of claim 42, wherein said mammalian cell culture is derived from a cell culture selected from the group consisting of human cells, non-human primate cells, HeLa cells, human diploid cells, fetal rhesus lung cells, human embryonic kidney cells, VERO cells, horse cells, cow cells, sheep cells, dog cells, cat cells or rodent cells.

45. The method of claim 42, wherein said mammalian cell culture is derived from VERO cells or fetal rhesus kidney cells.

46. The method of claim 42, wherein said mammalian cells are cultured in serum free media.

47. The method of claim 42, wherein said mammalian cells are cultured in protein free media.

48. The method of claim 42, wherein said inoculating step comprising absorbing the SARS virus onto the cell culture for 60 to 300 minutes.

49. The method of claim 42, wherein said inoculating step is conducted at 25° C. to 40° C.

50. The method of claim 42, wherein said purification step comprises one or more of the treatments selected from the group consisting of gradient centrifugation, ultracentrifugation, continuous-flow ultracentrifugation, chromatography, polyethylene glycol precipitation, and ammonium sulfate precipitation.

51. The method of claim 42, wherein said purification step comprises one or more of the treatments selected from the group consisting of ultrafiltration and dialfiltration.

52. The method of claim 50, wherein said chromatography treatment includes one or more of the chromatography treatments selected from the group consisting of ion exchange chromatography, size exclusion chromatography, and liquid affinity chromatography.

53. The method of claim 52, wherein said chromatography treatment includes use of one more chromatographic resins selected from the group consisting of an an anionic resin and a cationic resin.

54. The method of claim 52, wherein the ion exchange chromatography treatment includes a first step using a strong anion exchange resin and a second step using a strong cation exchange resin.

55. The method of claim 50, wherein said gradient centrifugation purification step comprises density gradient centrifugation.

56. The method of claim 42, wherein said purification step comprises a first step of chromatography purification and a second step of gradient centrifugation.

57. The method of claim 56, wherein said first chromatography purification step comprises liquid affinity chromatography.

58. The method of claim 56, wherein said second gradient centrifugation step comprises density gradient centrifugation.

59. A single-stranded oligonucleotide comprising a nucleotide sequence selected from the group consisting of SEQ ID NOS: 21-6020, 6076-6568, 6586-6587, 7292-7301, 7325-7328, 7332-7352, 7353-7385, 10235-10298, 10352-10504, 10580-11322 and 11325-11551.

60. A single-stranded oligonucleotide comprising the complement of the oligonucleotide of claim 59.

61. The oligonucleotide of claim 59 or claim 60, comprising 10-30 nucleotides.

62. The oligonucleotide of claim 61, comprising the nucleotide sequence of SEQ ID NO: 7292, SEQ ID NO: 7293, the complement of SEQ ID NO: 7292 or the complement of SEQ ID NO: 7293.

63. A kit comprising primers for amplifying a template sequence contained within a SARS virus nucleic acid target, the kit comprising a first primer and a second primer, wherein the first primer comprises a sequence substantially complementary to a portion of said template sequence and the second primer comprises a sequence substantially complementary to a portion of the complement of said template sequence, wherein the sequences within said primers which have substantial complementarity define the termini of the template sequence to be amplified.

64. The kit of claim 63, wherein the template sequence is contained within SEQ ID NO: 1 and/or SEQ ID NO: 2.

65. The kit of claim 63 or claim 64, wherein the first primer comprises a fragment of 8 or more nucleotides of SEQ ID NO: 1, and the second primer comprises a fragment of 8 or more nucleotides of the complement of SEQ ID NO: 1.

66. The kit of claim 63 or claim 64, wherein the first primer comprises a fragment of 8 or more nucleotides of SEQ ID NO: 2, and the second primer comprises a fragment of 8 or more nucleotides of the complement of SEQ ID NO: 2.

67. The kit of claim 63, wherein the first primer is an oligonucleotide according to any one of claims 59 to 62 and the second primer is an oligonucleotide according to any of claims 59 to 62.

68. The kit of any one of claims 63 to 67, further comprising a labeled probe that comprises either a fragment of 8 or more nucleotides of SEQ ID NO: 1 and/or SEQ ID NO: 2, or the complement of said fragment, which fragment is located within the template sequence.

69. The kit of any one of claims 63 to 68, wherein the first primer and/or the second primer comprises a nucleotide sequence selected from the group consisting of SEQ ID NOS: 21-6020, 6076-6568, 6586-6587, 7292-7301, 7325-7328, 7332-7352, 7353-7385, 10235-10298, 10352-10504, 10580-11322 and 11325-11551.

70. The kit of any one of claims 63 to 68, wherein the first primer and/or the second primer comprises the complement of a nucleotide sequence selected from the group consisting of SEQ ID NOS: 21-6020, 6076-6568, 6586-6587, 7292-7301, 7325-7328, 7332-7352, 7353-7385, 10235-10298, 10352-10504, 10580-11322 and 11325-11551.

71. A method of detecting the presence of SARS virus in a sample comprising providing a sample suspected of containing a SARS virus nucleic acid target, amplifying a template sequence contained within said SARS virus nucleic acid target with the kit of any one of claims 63 to 70, and detecting the amplified template sequence, wherein the presence of the amplified template sequence indicates the presence of SARS virus in said sample.

72. The method of claim 71, wherein said amplifying is accomplished using polymerase chain reaction, transcription mediated amplification, reverse transcription PCR, ligase chain reaction, strand displacement amplification or nucleic acid sequence-based amplification.

73. A double-stranded RNA molecule with a length from about 10 to about 30 nucleotides which is able to inactivate the SARS coronavirus in a mammalian cell.

74. The double-stranded RNA of claim 73, wherein the sequence of one of the strands is at least 90% identical to a target sequence, wherein the target sequence is a fragment of SEQ ID NO: 1 and/or SEQ ID NO: 2.

75. The double-stranded RNA of claim 73 or claim 74, wherein the target sequence comprising a nucleotide sequence selected from the group consisting of SEQ ID NOS: 7292, 7293, 7294, 7295, 7296, 7297, 7298, 7299, 7300 and 7301.

76. The double-stranded RNA of any one of claims 73 to 75, comprising at least one modified nucleotide.

77. A method for treating a patient suffering from SARS, comprising: administering to the patient a therapeutically effective dose of a molecule of less than 1000 g/mol.

78. The method of claim 77, wherein the molecule has an aromatic region and greater than one heteroatom selected from O, S, or N.

79. A method for treating a patient suffering from SARS, comprising: administering to the patient a therapeutically effective dose of a compound selected from: a nucleoside analog, a peptoid, an oligopeptide, a polypeptide a protease inhibitor, a 3C-like protease inhibitor, a papain-like protease inhibitor, or an inhibitor of an RNA dependent RNA polymerase.

80. A method for treating a patient suffering from SARS, comprising: administering to the patient a steroidal anti-inflammatory drug in combination with at least one antiviral compound.

81. A method for treating a patient suffering from SARS, comprising: administering to the patient a therapeutically effective dose of a compound selected from: acyclovir, gancyclovir, vidarabidine, foscamet, cidofovir, amantidine, ribavirin, trifluorothymidine, zidovudine, didanosine, zalcitabine, an antiviral compound listed in Table 1; an antiviral compound listed in Table 2; or an interferon.

82. The method of claim 81, wherein the interferon is an interferon-α or an interferon-β.

83. The method of any one of claims 77 to 82, wherein the molecule or compound is delivered by inhalation.

84. A method of identifying a therapeutically active agent comprising the steps of: (a) contacting a therapeutically active agent with a cell infected with the SARS virus; (b) measuring attenuation of a SARS related enzyme.

85. A viral vector or particle for in vivo delivery of a nucleic acid of claim 9 or claim 10.

86. The viral vector of claim 85, wherein the vector is an adenovirus vector, a poxvirus vector or an alphavirus vector.

87. An alphavirus replicon particle comprising one or more SARS viral antigens.

88. The replicon particle of claim 87, wherein said SARS viral antigen is a spike protein.

89. The replicon particle of claim 87, wherein said particle comprises a replicon derived from Venezuelan Equine Encephalitis (VEE) and further comprises an envelope derived from Sindbus virus (SIN) or Semliki Forest Virus (SFV).

90. A vaccine comprising one or more SARS virus antigens and one or more respiratory virus antigens.

91. The vaccine of claim 90, wherein said respiratory virus antigens are selected from the group consisting of influenza virus, human rhinovirus (HRV), parainfluenza virus (PIV), respiratory syncytial virus (RSV), adenovirus, metapneumovirus, and rhinovirus.

92. The vaccine of claim 91, wherein said respiratory virus antigen is from influenza virus.

93. The vaccine of claim 90, wherein said respiratory virus antigen is from a coronavirus other than the SARS virus.

94. A polypeptide comprising an immunogenic, surface exposed fragment of the amino acid sequence SEQ ID NO: 6042.

95. The polypeptide of claim 94, wherein said fragment does not include the last 50 amino acids of the C-terminus of SEQ ID NO: 6042.

96. The polypeptide of claim 94, wherein said fragment does not include a transdomain region of SEQ ID NO: 6042.

97. The polypeptide of claim 94, wherein said fragment does not include a C-terminus cytoplasmic domain of SEQ ID NO: 6042.

98. The polypeptide of claim 94, wherein said fragment does not include a N-terminus signal sequence.

99. An isolated polynucleotide comprising a nucleic acid sequence selected from the group consisting of SEQ ID NOS: 9968 and 10066.

100. The polynucleotide of claim 99, wherein the polynucleotide comprising a nucleic acid sequence having >80% sequence identity to a polynucleotide sequence selected from the group consisting of SEQ ID NOS: 9968 and 10066.

101. An isolated polynucleotide comprising a fragment of at least 15 consecutive nucleic acids of a nucleic acid sequence selected from the group consisting of SEQ ID NOS: 9968 and 10066 and wherein said fragment does not consist entirely of SEQ ID NO: 10033.

102. An isolated polypeptide comprising an amino acid sequence encoded by any one of claims 99-101.

103. The polypeptide of claim 102, comprising an amino acid sequence selected from the group consisting of SEQ ID NOS: 9969-10032, 10067, and 10015.

104. The polypeptide of claim 103, wherein the amino acid sequence is selected from the group consisting of SEQ ID NOS: 9997, 9998 and 10015.

105. An expression construct for recombinant expression of a SARS virus spike protein wherein said construct comprises a nucleic acid sequence selected from the group consisting of SEQ ID NOS: 6578-6583.

106. A mammalian cell line stably expressing a SARS viral antigen.

107. The cell line of claim 106, wherein said cell line is a Chinese Hamster Ovary (CHO) cell.

108. The cell line of claim 106, wherein the SARS viral antigen is a spike protein or fragment thereof.

109. The cell line of claim 106, wherein the spike protein is truncated to remove the transmembrane sequence.

110. A method of identifying a therapeutically active agent comprising the steps of: (a) contacting a therapeutically active agent with a buffer comprising SARS enzyme; and (b) measuring attenuation of the SARS enzyme.

111. The method of claim 110 wherein the SARS enzyme is a SARS protease.

112. The method of claim 111 wherein the buffer further comprises a peptide with a SARS protease cleave site.

113. The method of claim 110 wherein the measurement is made by the measurement of fluorescence.

114. A vaccine of one of claims 22 to 37, and 90 to 93 further comprising an adjuvant.

115. The vaccine of claim 114 wherein the adjuvant is a SMIP.

116. The vaccine of claim 115 wherein the SMIP compound is selected from the group consisting of an acylpiperazine, a tryptanthrin, an indoledione, a tetrahydroisoquinoline, a benzocyclodione, an amino azavinyl compound, a thiosemicarbazone, a lactam, an aminobenzimidazole quinolinone, a hydropthalamide, a benzophenone, an isoxazole, a sterol, a quinazolinone, a pyrole, an anthraquinone, a quinoxaline, a triazine, an benzazole, and a pyrazolopyrimidine, or a pharmaceutically acceptable salt, ester, or prodrug thereof.

117. A method of vaccinating a subject comprising administering a vaccine of one of claims 22 to 37, and 90 to 93.

118. The method of claim 117 further comprising administering a SMIP.

119. A method for treating a patient of one of claims 77 to 82 further comprising administering at least one SMEP compound.

120. A method for treating a patient of one of claims 77 to 82 further comprising administering at least one SMIS compound.

The application's sequence listing, which the Patent Office published only in electronic form, follows.

SEQUENCE LISTING (11641 sequences)

SEQ ID NO: 1 - DNA, 29736 bp, SARS coronavirus
ctacccaggaaaagccaaccaacctcgatctcttgtagatctgttctctaaacgaactttaaaatctgtgtagctgtcgctcggctgcatgcctagtgcacctacgcagtataaacaataataaattttactgtcgttgacaagaaacgagtaactcgtccctcttctgcagactgcttacggtttcgtccgtgttgcagtcgatcatcagcatacctaggtttcgtccgggtgtgaccgaaaggtaagatggagagccttgttcttggtgtcaacgagaaaacacacgtccaactcagtttgcctgtccttcaggttagagacgtgctagtgcgtggcttcggggactctgtggaagaggccctatcggaggcacgtgaacacctcaaaaatggcacttgtggtctagtagagctggaaaaaggcgtactgccccagcttgaacagccctatgtgttcattaaacgttctgatgccttaagcaccaatcacggccacaaggtcgttgagctggttgcagaaatggacggcattcagtacggtcgtagcggtataacactgggagtactcgtgccacatgtgggcgaaaccccaattgcataccgcaatgttcttcttcgtaagaacggtaataagggagccggtggtcatagctatggcatcgatctaaagtcttatgacttaggtgacgagcttggcactgatcccattgaagattatgaacaaaactggaacactaagcatggcagtggtgcactccgtgaactcactcgtgagctcaatggaggtgcagtcactcgctatgtcgacaacaatttctgtggcccagatgggtaccctcttgattgcatcaaagattttctcgcacgcgcgggcaagtcaatgtgcactctttccgaacaacttgattacatcgagtcgaagagaggtgtctactgctgccgtgaccatgagcatgaaattgcctggttcactgagcgctctgataagagctacgagcaccagacacccttcgaaattaagagtgccaagaaatttgacactttcaaaggggaatgcccaaagtttgtgtttcctcttaactcaaaagtcaaagtcattcaaccacgtgttgaaaagaaaaagactgagggtttcatggggcgtatacgctctgtgtaccctgttgcatctccacaggagtgtaacaatatgcacttgtctaccttgatgaaatgtaatcattgcgatgaagtttcatggcagacgtgcgactttctgaaagccacttgtgaacattgtggcactgaaaatttagttattgaaggacctactacatgtgggtacctacctactaatgctgtagtgaaaatgccatgtcctgcctgtcaagacccagagattggacctgagcatagtgttgcagattatcacaaccactcaaacattgaaactcgactccgcaagggaggtaggactagatgttttggaggctgtgtgtttgcctatgttggctgctataataagcgtgcctactgggttcctcgtgctagtgctgatattggctcaggccatactggcattactggtgacaatgtggagaccttgaatgaggatctccttgagatactgagtcgtgaacgtgttaacattaacattgttggcgattttcatttgaatgaagaggttgccatcattttggcatctttctctgcttctacaagtgcctttattgacactataaagagtcttgattacaagtctttcaaaaccattgttgagtcctgcggtaactataaagttaccaagggaaagcccgtaaaaggtgcttggaacattggacaacagagatcagttttaacaccactgtgtggttttccctcacaggctgctggtgttatcagatcaatttttgcgcgcacacttgatgcagcaaaccactcaattcctgatttgcaaagagcagctgtcaccatacttgatggtatttctgaacagtcattacgtcttgtcgacgccatggtttatacttcagacctgctcaccaacagtgtcattattatggcatatgtaactggtggtcttgtacaacagacttctcagtggttgtctaatcttttgggcactactgttgaaaaactcaggcctatctttgaatggattgaggcgaaacttagtgcaggagttgaatttctcaaggatgcttgggagattctcaaatttctcattacaggtgtttttgacatcgtcaagggtcaaatacaggttgcttcagataacatcaaggattgtgtaaaatgcttcattgatgttgttaacaaggcactcgaaatgtgcattgatcaagtcactatcgctggcgcaaagttgcgatcactcaacttaggtgaagtcttcatcgctcaaagcaagggactttaccgtcagtgtatacgtggcaaggagcagctgcaactactcatgcctcttaaggcaccaaaagaagtaacctttcttgaaggtgattcacatgacacagtacttacctctgaggaggttgttctcaagaacggtgaactcgaagcactcgagacgcccgttgatagcttcacaaatggagctatcgtcggcacaccagtctgtgtaaatggcctcatgctcttagagattaaggacaaagaacaatactgcgcattgtctcctggtttactggctacaaacaatgtctttcgcttaaaagggggtgcaccaattaaaggtgtaacctttggagaagatactgtttgggaagttcaaggttacaagaatgtgagaatcacatttgagcttgatgaacgtgttgacaaagtgcttaatgaaaagtgctctgtctacactgttgaatccggtaccgaagttactgagtttgcatgtgttgtagcagaggctgttgtgaagactttacaaccagtttctgatctccttaccaacatgggtattgatcttgatgagtggagtgtagctacattctacttatttgatgatgctggtgaagaaaacttttcatcacgtatgtattgttccttttaccctccagatgaggaagaagaggacgatgcagagtgtgaggaagaagaaattgatgaaacctgtgaacatgagtacggtacagaggatgattatcaaggtctccctctggaatttggtgcctcagctgaaacagttcgagttgaggaagaagaagaggaagactggctggatgatactactgagcaatcagagattgagccagaaccagaacctacacctgaagaaccagttaatcagtttactggttatttaaaacttactgacaatgttgccattaaatgtgttgacatcgttaaggaggcacaaagtgctaatcctatggtgattgtaaatgctgctaacatacacctgaaacatggtggtggtgtagcaggtgcactcaacaaggcaaccaatggtgccatgcaaaaggagagtgatgattacattaagctaaatggccctcttacagtaggagggtcttgtttgctttctggacataatcttgctaagaagtgtctgcatgttgttggacctaacctaaatgcaggtgaggacatccagcttcttaaggcagcatatgaaaatttcaattcacaggacatcttacttgcaccattgttgtcagcaggcatatttggtgctaaaccacttcagtctttacaagtgtgcgtgcagacggttcgtacacaggtttatattgcagtcaatgacaaagctctttatgagcaggttgtcatggattatcttgataacctgaagcctagagtggaagcacctaaacaagaggagccaccaaacacagaagattccaaaactgaggagaaatctgtcgtacagaagcctgtcgatgtgaagccaaaaattaaggcctgcattgatgaggttaccacaacactggaagaaactaagtttcttaccaataagttactcttgtttgctgatatcaatggtaagctttaccatgattctcagaacatgcttagaggtgaagatatgtctttccttgagaaggatgcaccttacatggtaggtgatgttatcactagtggtgatatcacttgtgttgtaataccctccaaaaaggctggtggcactactgagatgctctcaagagctttgaagaaagtgccagttgatgagtatataaccacgtaccctggacaaggatgtgctggttatacacttgaggaagctaagactgctcttaagaaatgcaaatctgcattttatgtactaccttcagaagcacctaatgctaaggaagagattctaggaactgtatcctggaatttgagagaaatgcttgctcatgctgaagagacaagaaaattaatgcctatatgcatggatgttagagccataatggcaaccatccaacgtaagtataaaggaattaaaattcaagagggcatcgttgactatggtgtccgattcttcttttatactagtaaagagcctgtagcttctattattacgaagctgaactctctaaatgagccgcttgtcacaatgccaattggttatgtgacacatggttttaatcttgaagaggctgcgcgctgtatgcgttctcttaaagctcctgccgtagtgtcagtatcatcaccagatgctgttactacatataatggatacctcacttcgtcatcaaagacatctgaggagcactttgtagaaacagtttctttggctggctcttacagagattggtcctattcaggacagcgtacagagttaggtgttgaatttcttaagcgtggtgacaaaattgtgtaccacactctggagagccccgtcgagtttcatcttgacggtgaggttctttcacttgacaaactaaagagtctcttatccctgcgggaggttaagactataaaagtgttcacaactgtggacaacactaatctccacacacagcttgtggatatgtctatgacatatggacagcagtttggtccaacatacttggatggtgctgatgttacaaaaattaaacctcatgtaaatcatgagggtaagactttctttgtactacctagtgatgacacactacgtagtgaagctttcgagtactaccatactcttgatgagagttttcttggtaggtacatgtctgctttaaaccacacaaagaaatggaaatttcctcaagttggtggtttaacttcaattaaatgggctgataacaattgttatttgtctagtgttttattagcacttcaacagcttgaagtcaaattcaatgcaccagcacttcaagaggcttattatagagcccgtgctggtgatgctgctaacttttgtgcactcatactcgcttacagtaataaaactgttggcgagcttggtgatgtcagagaaactatgacccatcttctacagcatgctaatttggaatctgcaaagcgagttcttaatgtggtgtgtaaacattgtggtcagaaaactactaccttaacgggtgtagaagctgtgatgtatatgggtactctatcttatgataatcttaagacaggtgtttccattccatgtgtgtgtggtcgtgatgctacacaatatctagtacaacaagagtcttcttttgttatgatgtctgcaccacctgctgagtataaattacagcaaggtacattcttatgtgcgaatgagtacactggtaactatcagtgtggtcattacactcatataactgctaaggagaccctctatcgtattgacggagctcaccttacaaagatgtcagagtacaaaggaccagtgactgatgttttctacaaggaaacatcttacactacaaccatcaagcctgtgtcgtataaactcgatggagttacttacacagagattgaaccaaaattggatgggtattataaaaaggataatgcttactatacagagcagcctatagaccttgtaccaactcaaccattaccaaatgcgagttttgataatttcaaactcacatgttctaacacaaaatttgctgatgatttaaatcaaatgacaggcttcacaaagccagcttcacgagagctatctgtcacattcttcccagacttgaatggcgatgtagtggctattgactatagacactattcagcgagtttcaagaaaggtgctaaattactgcataagccaattgtttggcacattaaccaggctacaaccaagacaacgttcaaaccaaacacttggtgtttacgttgtctttggagtacaaagccagtagatacttcaaattcatttgaagttctggcagtagaagacacacaaggaatggacaatcttgcttgtgaaagtcaacaacccacctctgaagaagtagtggaaaatcctaccatacagaaggaagtcatagagtgtgacgtgaaaactaccgaagttgtaggcaatgtcatacttaaaccatcagatgaaggtgttaaagtaacacaagagttaggtcatgaggatcttatggctgcttatgtggaaaacacaagcattaccattaagaaacctaatgagctttcactagccttaggtttaaaaacaattgccactcatggtattgctgcaattaatagtgttccttggagtaaaattttggcttatgtcaaaccattcttaggacaagcagcaattacaacatcaaattgcgctaagagattagcacaacgtgtgtttaacaattatatgccttatgtgtttacattattgttccaattgtgtacttttactaaaagtaccaattctagaattagagcttcactacctacaactattgctaaaaatagtgttaagagtgttgctaaattatgtttggatgccggcattaattatgtgaagtcacccaaattttctaaattgttcacaatcgctatgtggctattgttgttaagtatttgcttaggttctctaatctgtgtaactgctgcttttggtgtactcttatctaattttggtgctccttcttattgtaatggcgttagagaattgtatcttaattcgtctaacgttactactatggatttctgtgaaggttcttttccttgcagcatttgtttaagtggattagactcccttgattcttatccagctcttgaaaccattcaggtgacgatttcatcgtacaagctagacttgacaattttaggtctggccgctgagtgggttttggcatatatgttgttcacaaaattcttttatttattaggtctttcagctataatgcaggtgttctttggctattttgctagtcatttcatcagcaattcttggctcatgtggtttatcattagtattgtacaaatggcacccgtttctgcaatggttaggatgtacatcttctttgcttctttctactacatatggaagagctatgttcatatcatggatggttgcacctcttcgacttgcatgatgtgctataagcgcaatcgtgccacacgcgttgagtgtacaactattgttaatggcatgaagagatctttctatgtctatgcaaatggaggccgtggcttctgcaagactcacaattggaattgtctcaattgtgacacattttgcactggtagtacattcattagtgatgaagttgctcgtgatttgtcactccagtttaaaagaccaatcaaccctactgaccagtcatcgtatattgttgatagtgttgctgtgaaaaatggcgcgcttcacctctactttgacaaggctggtcaaaagacctatgagagacatccgctctcccattttgtcaatttagacaatttgagagctaacaacactaaaggttcactgcctattaatgtcatagtttttgatggcaagtccaaatgcgacgagtctgcttctaagtctgcttctgtgtactacagtcagctgatgtgccaacctattctgttgcttgaccaagctcttgtatcagacgttggagatagtactgaagtttccgttaagatgtttgatgcttatgtcgacaccttttcagcaacttttagtgttcctatggaaaaacttaaggcacttgttgctacagctcacagcgagttagcaaagggtgtagctttagatggtgtcctttctacattcgtgtcagctgcccgacaaggtgttgttgataccgatgttgacacaaaggatgttattgaatgtctcaaactttcacatcactctgacttagaagtgacaggtgacagttgtaacaatttcatgctcacctataataaggttgaaaacatgacgcccagagatcttggcgcatgtattgactgtaatgcaaggcatatcaatgcccaagtagcaaaaagtcacaatgtttcactcatctggaatgtaaaagactacatgtctttatctgaacagctgcgtaaacaaattcgtagtgctgccaagaagaacaacataccttttagactaacttgtgctacaactagacaggttgtcaatgtcataactactaaaatctcactcaagggtggtaagattgttagtacttgttttaaacttatgcttaaggccacattattgtgcgttcttgctgcattggtttgttatatcgttatgccagtacatacattgtcaatccatgatggttacacaaatgaaatcattggttacaaagccattcaggatggtgtcactcgtgacatcatttctactgatgattgttttgcaaataaacatgctggttttgacgcatggtttagccagcgtggtggttcatacaaaaatgacaaaagctgccctgtagtagctgctatcattacaagagagattggtttcatagtgcctggcttaccgggtactgtgctgagagcaatcaatggtgacttcttgcattttctacctcgtgtttttagtgctgttggcaacatttgctacacaccttccaaactcattgagtatagtgattttgctacctctgcttgcgttcttgctgctgagtgtacaatttttaaggatgctatgggcaaacctgtgccatattgttatgacactaatttgctagagggttctatttcttatagtgagcttcgtccagacactcgttatgtgcttatggatggttccatcatacagtttcctaacacttacctggagggttctgttagagtagtaacaacttttgatgctgagtactgtagacatggtacatgcgaaaggtcagaagtaggtatttgcctatctaccagtggtagatgggttcttaataatgagcattacagagctctatcaggagttttctgtggtgttgatgcgatgaatctcatagctaacatctttactcctcttgtgcaacctgtgggtgctttagatgtgtctgcttcagtagtggctggtggtattattgccatattggtgacttgtgctgcctactactttatgaaattcagacgtgtttttggtgagtacaaccatgttgttgctgctaatgcacttttgtttttgatgtctttcactatactctgtctggtaccagcttacagctttctgccgggagtctactcagtcttttacttgtacttgacattctatttcaccaatgatgtttcattcttggctcaccttcaatggtttgccatgttttctcctattgtgcctttttggataacagcaatctatgtattctgtatttctctgaagcactgccattggttctttaacaactatcttaggaaaagagtcatgtttaatggagttacatttagtaccttcgaggaggctgctttgtgtacctttttgctcaacaaggaaatgtacctaaaattgcgtagcgagacactgttgccacttacacagtataacaggtatcttgctctatataacaagtacaagtatttcagtggagccttagatactaccagctatcgtgaagcagcttgctgccacttagcaaaggctctaaatgactttagcaactcaggtgctgatgttctctaccaaccaccacagacatcaatcacttctgctgttctgcagagtggttttaggaaaatggcattcccgtcaggcaaagttgaagggtgcatggtacaagtaacctgtggaactacaactcttaatggattgtggttggatgacacagtatactgtccaagacatgtcatttgcacagcagaagacatgcttaatcctaactatgaagatctgctcattcgcaaatccaaccatagctttcttgttcaggctggcaatgttcaacttcgtgttattggccattctatgcaaaattgtctgcttaggcttaaagttgatacttctaaccctaagacacccaagtataaatttgtccgtatccaacctggtcaaacattttcagttctagcatgctacaatggttcaccatctggtgtttatcagtgtgccatgagacctaatcataccattaaaggttctttccttaatggatcatgtggtagtgttggttttaacattgattatgattgcgtgtctttctgctatatgcatcatatggagcttccaacaggagtacacgctggtactgacttagaaggtaaattctatggtccatttgttgacagacaaactgcacaggctgcaggtacagacacaaccataacattaaatgttttggcatggctgtatgctgctgttatcaatggtgataggtggtttcttaatagattcaccactactttgaatgactttaaccttgtggcaatgaagtacaactatgaacctttgacacaagatcatgttgacatattgggacctctttctgctcaaacaggaattgccgtcttagatatgtgtgctgctttgaaagagctgctgcagaatggtatgaatggtcgtactatccttggtagcactattttagaagatgagtttacaccatttgatgttgttagacaatgctctggtgttaccttccaaggtaagttcaagaaaattgttaagggcactcatcattggatgcttttaactttcttgacatcactattgattcttgttcaaagtacacagtggtcactgtttttctttgtttacgagaatgctttcttgccatttactcttggtattatggcaattgctgcatgtgctatgctgcttgttaagcataagcacgcattcttgtgcttgtttctgttaccttctcttgcaacagttgcttactttaatatggtctacatgcctgctagctgggtgatgcgtatcatgacatggcttgaattggctgacactagcttgtctggttataggcttaaggattgtgttatgtatgcttcagctttagttttgcttattctcatgacagctcgcactgtttatgatgatgctgctagacgtgtttggacactgatgaatgtcattacacttgtttacaaagtctactatggtaatgctttagatcaagctatttccatgtgggccttagttatttctgtaacctctaactattctggtgtcgttacgactatcatgtttttagctagagctatagtgtttgtgtgtgttgagtattacccattgttatttattactggcaacaccttacagtgtatcatgcttgtttattgtttcttaggctattgttgctgctgctactttggccttttctgtttactcaaccgttacttcaggcttactcttggtgtttatgactacttggtctctacacaagaatttaggtatatgaactcccaggggcttttgcctcctaagagtagtattgatgctttcaagcttaacattaagttgttgggtattggaggtaaaccatgtatcaaggttgctactgtacagtctaaaatgtctgacgtaaagtgcacatctgtggtactgctctcggttcttcaacaacttagagtagagtcatcttctaaattgtgggcacaatgtgtacaactccacaatgatattcttcttgcaaaagacacaactgaagctttcgagaagatggtttctcttttgtctgttttgctatccatgcagggtgctgtagacattaataggttgtgcgaggaaatgctcgataaccgtgctactcttcaggctattgcttcagaatttagttctttaccatcatatgccgcttatgccactgcccaggaggcctatgagcaggctgtagctaatggtgattctgaagtcgttctcaaaaagttaaagaaatctttgaatgtggctaaatctgagtttgaccgtgatgctgccatgcaacgcaagttggaaaagatggcagatcaggctatgacccaaatgtacaaacaggcaagatctgaggacaagagggcaaaagtaactagtgctatgcaaacaatgctcttcactatgcttaggaagcttgataatgatgcacttaacaacattatcaacaatgcgcgtgatggttgtgttccactcaacatcataccattgactacagcagccaaactcatggttgttgtccctgattatggtacctacaagaacacttgtgatggtaacacctttacatatgcatctgcactctgggaaatccagcaagttgttgatgcggatagcaagattgttcaacttagtgaaattaacatggacaattcaccaaatttggcttggcctcttattgttacagctctaagagccaactcagctgttaaactacagaataatgaactgagtccagtagcactacgacagatgtcctgtgcggctggtaccacacaaacagcttgtactgatgacaatgcacttgcctactataacaattcgaagggaggtaggtttgtgctggcattactatcagaccaccaagatctcaaatgggctagattccctaagagtgatggtacaggtacaatttacacagaactggaaccaccttgtaggtttgttacagacacaccaaaagggcctaaagtgaaatacttgtacttcatcaaaggcttaaacaacctaaatagaggtatggtgctgggcagtttagctgctacagtacgtcttcaggctggaaatgctacagaagtacctgccaattcaactgtgctttccttctgtgcttttgcagtagaccctgctaaagcatataaggattacctagcaagtggaggacaaccaatcaccaactgtgtgaagatgttgtgtacacacactggtacaggacaggcaattactgtaacaccagaagctaacatggaccaagagtcctttggtggtgcttcatgttgtctgtattgtagatgccacattgaccatccaaatcctaaaggattctgtgacttgaaaggtaagtacgtccaaatacctaccacttgtgctaatgacccagtgggttttacacttagaaacacagtctgtaccgtctgcggaatgtggaaaggttatggctgtagttgtgaccaactccgcgaacccttgatgcagtctgcggatgcatcaacgtttttaaacgggtttgcggtgtaagtgcagcccgtcttacaccgtgcggcacaggcactagtactgatgtcgtctacagggcttttgatatttacaacgaaaaagttgctggttttgcaaagttcctaaaaactaattgctgtcgcttccaggagaaggatgaggaaggcaatttattagactcttactttgtagttaagaggcatactatgtctaactaccaacatgaagagactatttataacttggttaaagattgtccagcggttgctgtccatgactttttcaagtttagagtagatggtgacatggtaccacatatatcacgtcagcgtctaactaaatacacaatggctgatttagtctatgctctacgtcattttgatgagggtaattgtgatacattaaaagaaatactcgtcacatacaattgctgtgatgatgattatttcaataagaaggattggtatgacttcgtagagaatcctgacatcttacgcgtatatgctaacttaggtgagcgtgtacgccaatcattattaaagactgtacaattctgcgatgctatgcgtgatgcaggcattgtaggcgtactgacattagataatcaggatcttaatgggaactggtacgatttcggtgatttcgtacaagtagcaccaggctgcggagttcctattgtggattcatattactcattgctgatgcccatcctcactttgactagggcattggctgctgagtcccatatggatgctgatctcgcaaaaccacttattaagtgggatttgctgaaatatgattttacggaagagagactttgtctcttcgaccgttattttaaatattgggaccagacataccatcccaattgtattaactgtttggatgataggtgtatccttcattgtgcaaactttaatgtgttattttctactgtgtttccacctacaagttttggaccactagtaagaaaaatatttgtagatggtgttccttttgttgtttcaactggataccattttcgtgagttaggagtcgtacataatcaggatgtaaacttacatagctcgcgtctcagtttcaaggaacttttagtgtatgctgctgatccagctatgcatgcagcttctggcaatttattgctagataaacgcactacatgcttttcagtagctgcactaacaaacaatgttgcttttcaaactgtcaaacccggtaattttaataaagacttttatgactttgctgtgtctaaaggtttctttaaggaaggaagttctgttgaactaaaacacttcttctttgctcaggatggcaacgctgctatcagtgattatgactattatcgttataatctgccaacaatgtgtgatatcagacaactcctattcgtagttgaagttgttgataaatactttgattgttacgatggtggctgtattaatgccaaccaagtaatcgttaacaatctggataaatcagctggtttcccatttaataaatggggtaaggctagactttattatgactcaatgagttatgaggatcaagatgcacttttcgcgtatactaagcgtaatgtcatccctactataactcaaatgaatcttaagtatgccattagtgcaaagaatagagctcgcaccgtagctggtgtctctatctgtagtactatgacaaatagacagtttcatcagaaattattgaagtcaatagccgccactagaggagctactgtggtaattggaacaagcaagttttacggtggctggcataatatgttaaaaactgtttacagtgatgtagaaactccacaccttatgggttgggattatccaaaatgtgacagagccatgcctaacatgcttaggataatggcctctcttgttcttgctcgcaaacataacacttgctgtaacttatcacaccgtttctacaggttagctaacgagtgtgcgcaagtattaagtgagatggtcatgtgtggcggctcactatatgttaaaccaggtggaacatcatccggtgatgctacaactgcttatgctaatagtgtctttaacatttgtcaagctgttacagccaatgtaaatgcacttctttcaactgatggtaataagatagctgacaagtatgtccgcaatctacaacacaggctctatgagtgtctctatagaaatagggatgttgatcatgaattcgtggatgagttttacgcttacctgcgtaaacatttctccatgatgattctttctgatgatgccgttgtgtgctataacagtaactatgcggctcaaggtttagtagctagcattaagaactttaaggcagttctttattatcaaaataatgtgttcatgtctgaggcaaaatgttggactgagactgaccttactaaaggacctcacgaattttgctcacagcatacaatgctagttaaacaaggagatgattacgtgtacctgccttacccagatccatcaagaatattaggcgcaggctgttttgtcgatgatattgtcaaaacagatggtacacttatgattgaaaggttcgtgtcactggctattgatgcttacccacttacaaaacatcctaatcaggagtatgctgatgtctttcacttgtatttacaatacattagaaagttacatgatgagcttactggccacatgttggacatgtattccgtaatgctaactaatgataacacctcacggtactgggaacctgagttttatgaggctatgtacacaccacatacagtcttgcaggctgtaggtgcttgtgtattgtgcaattcacagacttcacttcgttgcggtgcctgtattaggagaccattcctatgttgcaagtgctgctatgaccatgtcatttcaacatcacacaaattagtgttgtctgttaatccctatgtttgcaatgccccaggttgtgatgtcactgatgtgacacaactgtatctaggaggtatgagctattattgcaagtcacataagcctcccattagttttccattatgtgctaatggtcaggtttttggtttatacaaaaacacatgtgtaggcagtgacaatgtcactgacttcaatgcgatagcaacatgtgattggactaatgctggcgattacatacttgccaacacttgtactgagagactcaagcttttcgcagcagaaacgctcaaagccactgaggaaacatttaagctgtcatatggtattgccactgtacgcgaagtactctctgacagagaattgcatctttcatgggaggttggaaaacctagaccaccattgaacagaaactatgtctttactggttaccgtgtaactaaaaatagtaaagtacagattggagagtacacctttgaaaaaggtgactatggtgatgctgttgtgtacagaggtactacgacatacaagttgaatgttggtgattactttgtgttgacatctcacactgtaatgccacttagtgcacctactctagtgccacaagagcactatgtgagaattactggcttgtacccaacactcaacatctcagatgagttttctagcaatgttgcaaattatcaaaaggtcggcatgcaaaagtactctacactccaaggaccacctggtactggtaagagtcattttgccatcggacttgctctctattacccatctgctcgcatagtgtatacggcatgctctcatgcagctgttgatgccctatgtgaaaaggcattaaaatatttgcccatagataaatgtagtagaatcatacctgcgcgtgcgcgcgtagagtgttttgataaattcaaagtgaattcaacactagaacagtatgttttctgcactgtaaatgcattgccagaaacaactgctgacattgtagtctttgatgaaatctctatggctactaattatgacttgagtgttgtcaatgctagacttcgtgcaaaacactacgtctatattggcgatcctgctcaattaccagccccccgcacattgctgactaaaggcacactagaaccagaatattttaattcagtgtgcagacttatgaaaacaataggtccagacatgttccttggaacttgtcgccgttgtcctgctgaaattgttgacactgtgagtgctttagtttatgacaataagctaaaagcacacaaggataagtcagctcaatgcttcaaaatgttctacaaaggtgttattacacatgatgtttcatctgcaatcaacagacctcaaataggcgttgtaagagaatttcttacacgcaatcctgcttggagaaaagctgtttttatctcaccttataattcacagaacgctgtagcttcaaaaatcttaggattgcctacgcagactgttgattcatcacagggttctgaatatgactatgtcatattcacacaaactactgaaacagcacactcttgtaatgtcaaccgcttcaatgtggctatcacaagggcaaaaattggcattttgtgcataatgtctgatagagatctttatgacaaactgcaatttacaagtctagaaataccacgtcgcaatgtggctacattacaagcagaaaatgtaactggactttttaaggactgtagtaagatcattactggtcttcatcctacacaggcacctacacacctcagcgttgatataaagttcaagactgaaggattatgtgttgacataccaggcataccaaaggacatgacctaccgtagactcatctctatgatgggtttcaaaatgaattaccaagtcaatggttaccctaatatgtttatcacccgcgaagaagctattcgtcacgttcgtgcgtggattggctttgatgtagagggctgtcatgcaactagagatgctgtgggtactaacctacctctccagctaggattttctacaggtgttaacttagtagctgtaccgactggttatgttgacactgaaaataacacagaattcaccagagttaatgcaaaacctccaccaggtgaccagtttaaacatcttataccactcatgtataaaggcttgccctggaatgtagtgcgtattaagatagtacaaatgctcagtgatacactgaaaggattgtcagacagagtcgtgttcgtcctttgggcgcatggctttgagcttacatcaatgaagtactttgtcaagattggacctgaaagaacgtgttgtctgtgtgacaaacgtgcaacttgcttttctacttcatcagatacttatgcctgctggaatcattctgtgggttttgactatgtctataacccatttatgattgatgttcagcagtggggctttacgggtaaccttcagagtaaccatgaccaacattgccaggtacatggaaatgcacatgtggctagttgtgatgctatcatgactagatgtttagcagtccatgagtgctttgttaagcgcgttgattggtctgttgaataccctattataggagatgaactgagggttaattctgcttgcagaaaagtacaacacatggttgtgaagtctgcattgcttgctgataagtttccagttcttcatgacattggaaatccaaaggctatcaagtgtgtgcctcaggctgaagtagaatggaagttctacgatgctcagccatgtagtgacaaagcttacaaaatagaggaactcttctattcttatgctacacatcacgataaattcactgatggtgtttgtttgttttggaattgtaacgttgatcgttacccagccaatgcaattgtgtgtaggtttgacacaagagtcttgtcaaacttgaacttaccaggctgtgatggtggtagtttgtatgtgaataagcatgcattccacactccagctttcgataaaagtgcatttactaatttaaagcaattgcctttcttttactattctgatagtccttgtgagtctcatggcaaacaagtagtgtcggatattgattatgttccactcaaatctgctacgtgtattacacgatgcaatttaggtggtgctgtttgcagacaccatgcaaatgagtaccgacagtacttggatgcatataatatgatgatttctgctggatttagcctatggatttacaaacaatttgatacttataacctgtggaatacatttaccaggttacagagtttagaaaatgtggcttataatgttgttaataaaggacactttgatggacacgccggcgaagcacctgtttccatcattaataatgctgtttacacaaaggtagatggtattgatgtggagatctttgaaaataagacaacacttcctgttaatgttgcatttgagctttgggctaagcgtaacattaaaccagtgccagagattaagatactcaataatttgggtgttgatatcgctgctaatactgtaatctgggactacaaaagagaagccccagcacatgtatctacaataggtgtctgcacaatgactgacattgccaagaaacctactgagagtgcttgttcttcacttactgtcttgtttgatggtagagtggaaggacaggtagacctttttagaaacgcccgtaatggtgttttaataacagaaggttcagtcaaaggtctaacaccttcaaagggaccagcacaagctagcgtcaatggagtcacattaattggagaatcagtaaaaacacagtttaactactttaagaaagtagacggcattattcaacagttgcctgaaacctactttactcagagcagagacttagaggattttaagcccagatcacaaatggaaactgactttctcgagctcgctatggatgaattcatacagcgatataagctcgagggctatgccttcgaacacatcgtttatggagatttcagtcatggacaacttggcggtcttcatttaatgataggcttagccaagcgctcacaagattcaccacttaaattagaggattttatccctatggacagcacagtgaaaaattacttcataacagatgcgcaaacaggttcatcaaaatgtgtgtgttctgtgattgatcttttacttgatgactttgtcgagataataaagtcacaagatttgtcagtgatttcaaaagtggtcaaggttacaattgactatgctgaaatttcattcatgctttggtgtaaggatggacatgttgaaaccttctacccaaaactacaagcaagtcgagcgtggcaaccaggtgttgcgatgcctaacttgtacaagatgcaaagaatgcttcttgaaaagtgtgaccttcagaattatggtgaaaatgctgttataccaaaaggaataatgatgaatgtcgcaaagtatactcaactgtgtcaatacttaaatacacttactttagctgtaccctacaacatgagagttattcactttggtgctggctctgataaaggagttgcaccaggtacagctgtgctcagacaatggttgccaactggcacactacttgtcgattcagatcttaatgacttcgtctccgacgcatattctactttaattggagactgtgcaacagtacatacggctaataaatgggaccttattattagcgatatgtatgaccctaggaccaaacatgtgacaaaagagaatgactctaaagaagggtttttcacttatctgtgtggatttataaagcaaaaactagccctgggtggttctatagctgtaaagataacagagcattcttggaatgctgacctttacaagcttatgggccatttctcatggtggacagcttttgttacaaatgtaaatgcatcatcatcggaagcatttttaattggggctaactatcttggcaagccgaaggaacaaattgatggctataccatgcatgctaactacattttctggaggaacacaaatcctatccagttgtcttcctattcactctttgacatgagcaaatttcctcttaaattaagaggaactgctgtaatgtctcttaaggagaatcaaatcaatgatatgatttattctcttctggaaaaaggtaggcttatcattagagaaaacaacagagttgtggtttcaagtgatattcttgttaacaactaaacgaacatgtttattttcttattatttcttactctcactagtggtagtgaccttgaccggtgcaccacttttgatgatgttcaagctcctaattacactcaacatacttcatctatgaggggggtttactatcctgatgaaatttttagatcagacactctttatttaactcaggatttatttcttccattttattctaatgttacagggtttcatactattaatcatacgtttggcaaccctgtcataccttttaaggatggtatttattttgctgccacagagaaatcaaatgttgtccgtggttgggtttttggttctaccatgaacaacaagtcacagtcggtgattattattaacaattctactaatgttgttatacgagcatgtaactttgaattgtgtgacaaccctttctttgctgtttctaaacccatgggtacacagacacatactatgatattcgataatgcatttaattgcactttcgagtacatatctgatgccttttcgcttgatgtttcagaaaagtcaggtaattttaaacacttacgagagtttgtgtttaaaaataaagatgggtttctctatgtttataagggctatcaacctatagatgtagttcgtgatctaccttctggttttaacactttgaaacctatttttaagttgcctcttggtattaacattacaaattttagagccattcttacagccttttcacctgctcaagacatttggggcacgtcagctgcagcctattttgttggctatttaaagccaactacatttatgctcaagtatgatgaaaatggtacaatcacagatgctgttgattgttctcaaaatccacttgctgaactcaaatgctctgttaagagctttgagattgacaaaggaatttaccagacctctaatttcagggttgttccctcaggagatgttgtgagattccctaatattacaaacttgtgtccttttggagaggtttttaatgctactaaattcccttctgtctatgcatgggagagaaaaaaaatttctaattgtgttgctgattactctgtgctctacaactcaacatttttttcaacctttaagtgctatggcgtttctgccactaagttgaatgatctttgcttctccaatgtctatgcagattcttttgtagtcaagggagatgatgtaagacaaatagcgccaggacaaactggtgttattgctgattataattataaattgccagatgatttcatgggttgtgtccttgcttggaatactaggaacattgatgctacttcaactggtaattataattataaatataggtatcttagacatggcaagcttaggccctttgagagagacatatctaatgtgcctttctcccctgatggcaaaccttgcaccccacctgctcttaattgttattggccattaaatgattatggtttttacaccactactggcattggctaccaaccttacagagttgtagtactttcttttgaacttttaaatgcaccggccacggtttgtggaccaaaattatccactgaccttattaagaaccagtgtgtcaattttaattttaatggactcactggtactggtgtgttaactccttcttcaaagagatttcaaccatttcaacaatttggccgtgatgtttctgatttcactgattccgttcgagatcctaaaacatctgaaatattagacatttcaccttgcgcttttgggggtgtaagtgtaattacacctggaacaaatgcttcatctgaagttgctgttctatatcaagatgttaactgcactgatgtttctacagcaattcatgcagatcaactcacaccagcttggcgcatatattctactggaaacaatgtattccagactcaagcaggctgtcttataggagctgagcatgtcgacacttcttatgagtgcgacattcctattggagctggcatttgtgctagttaccatacagtttctttattacgtagtactagccaaaaatctattgtggcttatactatgtctttaggtgctgatagttcaattgcttactctaataacaccattgctatacctactaacttttcaattagcattactacagaagtaatgcctgtttctatggctaaaacctccgtagattgtaatatgtacatctgcggagattctactgaatgtgctaatttgcttctccaatatggtagcttttgcacacaactaaatcgtgcactctcaggtattgctgctgaacaggatcgcaacacacgtgaagtgttcgctcaagtcaaacaaatgtacaaaaccccaactttgaaatattttggtggttttaatttttcacaaatattacctgaccctctaaagccaactaagaggtcttttattgaggacttgctctttaataaggtgacactcgctgatgctggcttcatgaagcaatatggcgaatgcctaggtgatattaatgctagagatctcatttgtgcgcagaagttcaatggacttacagtgttgccacctctgctcactgatgatatgattgctgcctacactgctgctctagttagtggtactgccactgctggatggacatttggtgctggcgctgctcttcaaataccttttgctatgcaaatggcatataggttcaatggcattggagttacccaaaatgttctctatgagaaccaaaaacaaatcgccaaccaatttaacaaggcgattagtcaaattcaagaatcacttacaacaacatcaactgcattgggcaagctgcaagacgttgttaaccagaatgctcaagcattaaacacacttgttaaacaacttagctctaattttggtgcaatttcaagtgtgctaaatgatatcctttcgcgacttgataaagtcgaggcggaggtacaaattgacaggttaattacaggcagacttcaaagccttcaaacctatgtaacacaacaactaatcagggctgctgaaatcagggcttctgctaatcttgctgctactaaaatgtctgagtgtgttcttggacaatcaaaaagagttgacttttgtggaaagggctaccaccttatgtccttcccacaagcagccccgcatggtgttgtcttcctacatgtcacgtatgtgccatcccaggagaggaacttcaccacagcgccagcaatttgtcatgaaggcaaagcatacttccctcgtgaaggtgtttttgtgtttaatggcacttcttggtttattacacagaggaacttcttttctccacaaataattactacagacaatacatttgtctcaggaaattgtgatgtcgttattggcatcattaacaacacagtttatgatcctctgcaacctgagcttgactcattcaaagaagagctggacaagtacttcaaaaatcatacatcaccagatgttgatcttggcgacatttcaggcattaacgcttctgtcgtcaacattcaaaaagaaattgaccgcctcaatgaggtcgctaaaaatttaaatgaatcactcattgaccttcaagaattgggaaaatatgagcaatatattaaatggccttggtatgtttggctcggcttcattgctggactaattgccatcgtcatggttacaatcttgctttgttgcatgactagttgttgcagttgcctcaagggtgcatgctcttgtggttcttgctgcaagtttgatgaggatgactctgagccagttctcaagggtgtcaaattacattacacataaacgaacttatggatttgtttatgagattttttactcttggatcaattactgcacagccagtaaaaattgacaatgcttctcctgcaagtactgttcatgctacagcaacgataccgctacaagcctcactccctttcggatggcttgttattggcgttgcatttcttgctgtttttcagagcgctaccaaaataattgcgctcaataaaagatggcagctagccctttataagggcttccagttcatttgcaatttactgctgctatttgttaccatctattcacatcttttgcttgtcgctgcaggtatggaggcgcaatttttgtacctctatgccttgatatattttctacaatgcatcaacgcatgtagaattattatgagatgttggctttgttggaagtgcaaatccaagaacccattactttatgatgccaactactttgtttgctggcacacacataactatgactactgtataccatataacagtgtcacagatacaattgtcgttactgaaggtgacggcatttcaacaccaaaactcaaagaagactaccaaattggtggttattctgaggataggcactcaggtgttaaagactatgtcgttgtacatggctatttcaccgaagtttactaccagcttgagtctacacaaattactacagacactggtattgaaaatgctacattcttcatctttaacaagcttgttaaagacccaccgaatgtgcaaatacacacaatcgacggctcttcaggagttgctaatccagcaatggatccaatttatgatgagccgacgacgactactagcgtgcctttgtaagcacaagaaagtgagtacgaacttatgtactcattcgtttcggaagaaacaggtacgttaatagttaatagcgtacttctttttcttgctttcgtggtattcttgctagtcacactagccatccttactgcgcttcgattgtgtgcgtactgctgcaatattgttaacgtgagtttagtaaaaccaacggtttacgtctactcgcgtgttaaaaatctgaactcttctgaaggagttcctgatcttctggtctaaacgaactaactattattattattctgtttggaactttaacattgcttatcatggcagacaacggtactattaccgttgaggagcttaaacaactcctggaacaatggaacctagtaataggtttcctattcctagcctggattatgttactacaatttgcctattctaatcggaacaggtttttgtacataataaagcttgttttcctctggctcttgtggccagtaacacttgcttgttttgtgcttgctgctgtctacagaattaattgggtgactggcgggattgcgattgcaatggcttgtattgtaggcttgatgtggcttagctacttcgttgcttccttcaggctgtttgctcgtacccgctcaatgtggtcattcaacccagaaacaaacattcttctcaatgtgcctctccgggggacaattgtgaccagaccgctcatggaaagtgaacttgtcattggtgctgtgatcattcgtggtcacttgcgaatggccggacactccctagggcgctgtgacattaaggacctgccaaaagagatcactgtggctacatcacgaacgctttcttattacaaattaggagcgtcgcagcgtgtaggcactgattcaggttttgctgcatacaaccgctaccgtattggaaactataaattaaatacagaccacgccggtagcaacgacaatattgctttgctagtacagtaagtgacaacagatgtttcatcttgttgacttccaggttacaatagcagagatattgattatcattatgaggactttcaggattgctatttggaatcttgacgttataataagttcaatagtgagacaattatttaagcctctaactaagaagaattattcggagttagatgatgaagaacctatggagttagattatccataaaacgaacatgaaaattattctcttcctgacattgattgtatttacatcttgcgagctatatcactatcaggagtgtgttagaggtacgactgtactactaaaagaaccttgcccatcaggaacatacgagggcaattcaccatttcaccctcttgctgacaataaatttgcactaacttgcactagcacacactttgcttttgcttgtgctgacggtactcgacatacctatcagctgcgtgcaagatcagtttcaccaaaacttttcatcagacaagaggaggttcaacaagagctctactcgccactttttctcattgttgctgctctagtatttttaatactttgcttcaccattaagagaaagacagaatgaatgagctcactttaattgacttctatttgtgctttttagcctttctgctattccttgttttaataatgcttattatattttggttttcactcgaaatccaggatctagaagaaccttgtaccaaagtctaaacgaacatgaaacttctcattgttttgacttgtatttctctatgcagttgcatatgcactgtagtacagcgctgtgcatctaataaacctcatgtgcttgaagatccttgtaaggtacaacactaggggtaatacttatagcactgcttggctttgtgctctaggaaaggttttaccttttcatagatggcacactatggttcaaacatgcacacctaatgttactatcaactgtcaagatccagctggtggtgcgcttatagctaggtgttggtaccttcatgaaggtcaccaaactgctgcatttagagacgtacttgttgttttaaataaacgaacaaattaaaatgtctgataatggaccccaatcaaaccaacgtagtgccccccgcattacatttggtggacccacagattcaactgacaataaccagaatggaggacgcaatggggcaaggccaaaacagcgccgaccccaaggtttacccaataatactgcgtcttggttcacagctctcactcagcatggcaaggaggaacttagattccctcgaggccagggcgttccaatcaacaccaatagtggtccagatgaccaaattggctactaccgaagagctacccgacgagttcgtggtggtgacggcaaaatgaaagagctcagccccagatggtacttctattacctaggaactggcccagaagcttcacttccctacggcgctaacaaagaaggcatcgtatgggttgcaactgagggagccttgaatacacccaaagaccacattggcacccgcaatcctaataacaatgctgccaccgtgctacaacttcctcaaggaacaacattgccaaaaggcttctacgcagagggaagcagaggcggcagtcaagcctcttctcgctcctcatcacgtagtcgcggtaattcaagaaattcaactcctggcagcagtaggggaaattctcctgctcgaatggctagcggaggtggtgaaactgccctcgcgctattgctgctagacagattgaaccagcttgagagcaaagtttctggtaaaggccaacaacaacaaggccaaactgtcactaagaaatctgctgctgaggcatctaaaaagcctcgccaaaaacgtactgccacaaaacagtacaacgtcactcaagcatttgggagacgtggtccagaacaaacccaaggaaatttcggggaccaagacctaatcagacaaggaactgattacaaacattggccgcaaattgcacaatttgctccaagtgcctctgcattctttggaatgtcacgcattggcatggaagtcacaccttcgggaacatggctgacttatcatggagccattaaattggatgacaaagatccacaattcaaagacaacgtcatactgctgaacaagcacattgacgcatacaaaacattcccaccaacagagcctaaaaaggacaaaaagaaaaagactgatgaagctcagcctttgccgcagagacaaaagaagcagcccactgtgactcttcttcctgcggctgacatggatgatttctccagacaacttcaaaattccatgagtggagcttctgctgattcaactcaggcataaacactcatgatgaccacacaaggcagatgggctatgtaaacgttttcgcaattccgtttacgatacatagtctactcttgtgcagaatgaattctcgtaactaaacagcacaagtaggtttagttaactttaatctcacatagcaatctttaatcaatgtgtaacattagggaggacttgaaagagccaccacattttcatcgaggccacgcggagtacgatcgagggtacagtgaataatgctagggagagctgcctatatggaagagccctaatgtgtaaaattaattttagtagtgctatccccatgtgattttaatagcttcttaggagaatgacaaaaaaaaaaaaaaaaaaaaaaaa

SEQ ID NO: 2 - DNA, 29727 bp, SARS Coronavirus
ttattaggtttttacctacccaggaaaagccaaccaacctcgatctcttgtagatctgttctctaaacgaactttaaaatctgtgtagctgtcgctcggctgcatgcctagtgcacctacgcagtataaacaataataaattttactgtcgttgacaagaaacgagtaactcgtccctcttctgcagactgcttacggtttcgtccgtgttgcagtcgatcatcagcatacctaggtttcgtccgggtgtgaccgaaaggtaagatggagagccttgttcttggtgtcaacgagaaaacacacgtccaactcagtttgcctgtccttcaggttagagacgtgctagtgcgtggcttcggggactctgtggaagaggccctatcggaggcacgtgaacacctcaaaaatggcacttgtggtctagtagagctggaaaaaggcgtactgccccagcttgaacagccctatgtgttcattaaacgttctgatgccttaagcaccaatcacggccacaaggtcgttgagctggttgcagaaatggacggcattcagtacggtcgtagcggtataacactgggagtactcgtgccacatgtgggcgaaaccccaattgcataccgcaatgttcttcttcgtaagaacggtaataagggagccggtggtcatagctatggcatcgatctaaagtcttatgacttaggtgacgagcttggcactgatcccattgaagattatgaacaaaactggaacactaagcatggcagtggtgcactccgtgaactcactcgtgagctcaatggaggtgcagtcactcgctatgtcgacaacaatttctgtggcccagatgggtaccctcttgattgcatcaaagattttctcgcacgcgcgggcaagtcaatgtgcactctttccgaacaacttgattacatcgagtcgaagagaggtgtctactgctgccgtgaccatgagcatgaaattgcctggttcactgagcgctctgataagagctacgagcaccagacacccttcgaaattaagagtgccaagaaatttgacactttcaaaggggaatgcccaaagtttgtgtttcctcttaactcaaaagtcaaagtcattcaaccacgtgttgaaaagaaaaagactgagggtttcatggggcgtatacgctctgtgtaccctgttgcatctccacaggagtgtaacaatatgcacttgtctaccttgatgaaatgtaatcattgcgatgaagtttcatggcagacgtgcgactttctgaaagccacttgtgaacattgtggcactgaaaatttagttattgaaggacctactacatgtgggtacctacctactaatgctgtagtgaaaatgccatgtcctgcctgtcaagacccagagattggacctgagcatagtgttgcagattatcacaaccactcaaacattgaaactcgactccgcaagggaggtaggactagatgttttggaggctgtgtgtttgcctatgttggctgctataataagcgtgcctactgggttcctcgtgctagtgctgatattggctcaggccatactggcattactggtgacaatgtggagaccttgaatgaggatctccttgagatactgagtcgtgaacgtgttaacattaacattgttggcgattttcatttgaatgaagaggttgccatcattttggcatctttctctgcttctacaagtgcctttattgacactataaagagtcttgattacaagtctttcaaaaccattgttgagtcctgcggtaactataaagttaccaagggaaagcccgtaaaaggtgcttggaacattggacaacagagatcagttttaacaccactgtgtggttttccctcacaggctgctggtgttatcagatcaatttttgcgcgcacacttgatgcagcaaaccactcaattcctgatttgcaaagagcagctgtcaccatacttgatggtatttctgaacagtcattacgtcttgtcgacgccatggtttatacttcagacctgctcaccaacagtgtcattattatggcatatgtaactggtggtcttgtacaacagacttctcagtggttgtctaatcttttgggcactactgttgaaaaactcaggcctatctttgaatggattgaggcgaaacttagtgcaggagttgaatttctcaaggatgcttgggagattctcaaatttctcattacaggtgtttttgacatcgtcaagggtcaaatacaggttgcttcagataacatcaaggattgtgtaaaatgcttcattgatgttgttaacaaggcactcgaaatgtgcattgatcaagtcactatcgctggcgcaaagttgcgatcactcaacttaggtgaagtcttcatcgctcaaagcaagggactttaccgtcagtgtatacgtggcaaggagcagctgcaactactcatgcctcttaaggcaccaaaagaagtaacctttcttgaaggtgattcacatgacacagtacttacctctgaggaggttgttctcaagaacggtgaactcgaagcactcgagacgcccgttgatagcttcacaaatggagctatcgttggcacaccagtctgtgtaaatggcctcatgctcttagagattaaggacaaagaacaatactgcgcattgtctcctggtttactggctacaaacaatgtctttcgcttaaaagggggtgcaccaattaaaggtgtaacctttggagaagatactgtttgggaagttcaaggttacaagaatgtgagaatcacatttgagcttgatgaacgtgttgacaaagtgcttaatgaaaagtgctctgtctacactgttgaatccggtaccgaagttactgagtttgcatgtgttgtagcagaggctgttgtgaagactttacaaccagtttctgatctccttaccaacatgggtattgatcttgatgagtggagtgtagctacattctacttatttgatgatgctggtgaagaaaacttttcatcacgtatgtattgttccttttaccctccagatgaggaagaagaggacgatgcagagtgtgaggaagaagaaattgatgaaacctgtgaacatgagtacggtacagaggatgattatcaaggtctccctctggaatttggtgcctcagctgaaacagttcgagttgaggaagaagaagaggaagactggctggatgatactactgagcaatcagagattgagccagaaccagaacctacacctgaagaaccagttaatcagtttactggttatttaaaacttactgacaatgttgccattaaatgtgttgacatcgttaaggaggcacaaagtgctaatcctatggtgattgtaaatgctgctaacatacacctgaaacatggtggtggtgtagcaggtgcactcaacaaggcaaccaatggtgccatgcaaaaggagagtgatgattacattaagctaaatggccctcttacagtaggagggtcttgtttgctttctggacataatcttgctaagaagtgtctgcatgttgttggacctaacctaaatgcaggtgaggacatccagcttcttaaggcagcatatgaaaatttcaattcacaggacatcttacttgcaccattgttgtcagcaggcatatttggtgctaaaccacttcagtctttacaagtgtgcgtgcagacggttcgtacacaggtttatattgcagtcaatgacaaagctctttatgagcaggttgtcatggattatcttgataacctgaagcctagagtggaagcacctaaacaagaggagccaccaaacacagaagattccaaaactgaggagaaatctgtcgtacagaagcctgtcgatgtgaagccaaaaattaaggcctgcattgatgaggttaccacaacactggaagaaactaagtttcttaccaataagttactcttgtttgctgatatcaatggtaagctttaccatgattctcagaacatgcttagaggtgaagatatgtctttccttgagaaggatgcaccttacatggtaggtgatgttatcactagtggtgatatcacttgtgttgtaataccctccaaaaaggctggtggcactactgagatgctctcaagagctttgaagaaagtgccagttgatgagtatataaccacgtaccctggacaaggatgtgctggttatacacttgaggaagctaagactgctcttaagaaatgcaaatctgcattttatgtactaccttcagaagcacctaatgctaaggaagagattctaggaactgtatcctggaatttgagagaaatgcttgctcatgctgaagagacaagaaaattaatgcctatatgcatggatgttagagccataatggcaaccatccaacgtaagtataaaggaattaaaattcaagagggcatcgttgactatggtgtccgattcttcttttatactagtaaagagcctgtagcttctattattacgaagctgaactctctaaatgagccgcttgtcacaatgccaattggttatgtgacacatggttttaatcttgaagaggctgcgcgctgtatgcgttctcttaaagctcctgccgtagtgtcagtatcatcaccagatgctgttactacatataatggatacctcacttcgtcatcaaagacatctgaggagcactttgtagaaacagtttctttggctggctcttacagagattggtcctattcaggacagcgtacagagttaggtgttgaatttcttaagcgtggtgacaaaattgtgtaccacactctggagagccccgtcgagtttcatcttgacggtgaggttctttcacttgacaaactaaagagtctcttatccctgcgggaggttaagactataaaagtgttcacaactgtggacaacactaatctccacacacagcttgtggatatgtctatgacatatggacagcagtttggtccaacatacttggatggtgctgatgttacaaaaattaaacctcatgtaaatcatgagggtaagactttctttgtactacctagtgatgacacactacgtagtgaagctttcgagtactaccatactcttgatgagagttttcttggtaggtacatgtctgctttaaaccacacaaagaaatggaaatttcctcaagttggtggtttaacttcaattaaatgggctgataacaattgttatttgtctagtgttttattagcacttcaacagcttgaagtcaaattcaatgcaccagcacttcaagaggcttattatagagcccgtgctggtgatgctgctaacttttgtgcactcatactcgcttacagtaataaaactgttggcgagcttggtgatgtcagagaaactatgacccatcttctacagcatgctaatttggaatctgcaaagcgagttcttaatgtggtgtgtaaacattgtggtcagaaaactactaccttaacgggtgtagaagctgtgatgtatatgggtactctatcttatgataatcttaagacaggtgtttccattccatgtgtgtgtggtcgtgatgctacacaatatctagtacaacaagagtcttcttttgttatgatgtctgcaccacctgctgagtataaattacagcaaggtacattcttatgtgcgaatgagtacactggtaactatcagtgtggtcattacactcatataactgctaaggagaccctctatcgtattgacggagctcaccttacaaagatgtcagagtacaaaggaccagtgactgatgttttctacaaggaaacatcttacactacaaccatcaagcctgtgtcgtataaactcgatggagttacttacacagagattgaaccaaaattggatgggtattataaaaaggataatgcttactatacagagcagcctatagaccttgtaccaactcaaccattaccaaatgcgagttttgataatttcaaactcacatgttctaacacaaaatttgctgatgatttaaatcaaatgacaggcttcacaaagccagcttcacgagagctatctgtcacattcttcccagacttgaatggcgatgtagtggctattgactatagacactattcagcgagtttcaagaaaggtgctaaattactgcataagccaattgtttggcacattaaccaggctacaaccaagacaacgttcaaaccaaacacttggtgtttacgttgtctttggagtacaaagccagtagatacttcaaattcatttgaagttctggcagtagaagacacacaaggaatggacaatcttgcttgtgaaagtcaacaacccacctctgaagaagtagtggaaaatcctaccatacagaaggaagtcatagagtgtgacgtgaaaactaccgaagttgtaggcaatgtcatacttaaaccatcagatgaaggtgttaaagtaacacaagagttaggtcatgaggatcttatggctgcttatgtggaaaacacaagcattaccattaagaaacctaatgagctttcactagccttaggtttaaaaacaattgccactcatggtattgctgcaattaatagtgttccttggagtaaaattttggcttatgtcaaaccattcttaggacaagcagcaattacaacatcaaattgcgctaagagattagcacaacgtgtgtttaacaattatatgccttatgtgtttacattattgttccaattgtgtacttttactaaaagtaccaattctagaattagagcttcactacctacaactattgctaaaaatagtgttaagagtgttgctaaattatgtttggatgccggcattaattatgtgaagtcacccaaattttctaaattgttcacaatcgctatgtggctattgttgttaagtatttgcttaggttctctaatctgtgtaactgctgcttttggtgtactcttatctaattttggtgctccttcttattgtaatggcgttagagaattgtatcttaattcgtctaacgttactactatggatttctgtgaaggttcttttccttgcagcatttgtttaagtggattagactcccttgattcttatccagctcttgaaaccattcaggtgacgatttcatcgtacaagctagacttgacaattttaggtctggccgctgagtgggttttggcatatatgttgttcacaaaattcttttatttattaggtctttcagctataatgcaggtgttctttggctattttgctagtcatttcatcagcaattcttggctcatgtggtttatcattagtattgtacaaatggcacccgtttctgcaatggttaggatgtacatcttctttgcttctttctactacatatggaagagctatgttcatatcatggatggttgcacctcttcgacttgcatgatgtgctataagcgcaatcgtgccacacgcgttgagtgtacaactattgttaatggcatgaagagatctttctatgtctatgcaaatggaggccgtggcttctgcaagactcacaattggaattgtctcaattgtgacacattttgcactggtagtacattcattagtgatgaagttgctcgtgatttgtcactccagtttaaaagaccaatcaaccctactgaccagtcatcgtatattgttgatagtgttgctgtgaaaaatggcgcgcttcacctctactttgacaaggctggtcaaaagacctatgagagacatccgctctcccattttgtcaatttagacaatttgagagctaacaacactaaaggttcactgcctattaatgtcatagtttttgatggcaagtccaaatgcgacgagtctgcttctaagtctgcttctgtgtactacagtcagctgatgtgccaacctattctgttgcttgaccaagttcttgtatcagacgttggagatagtactgaagtttccgttaagatgtttgatgcttatgtcgacaccttttcagcaacttttagtgttcctatggaaaaacttaaggcacttgttgctacagctcacagcgagttagcaaagggtgtagctttagatggtgtcctttctacattcgtgtcagctgcccgacaaggtgttgttgataccgatgttgacacaaaggatgttattgaatgtctcaaactttcacatcactctgacttagaagtgacaggtgacagttgtaacaatttcatgctcacctataataaggttgaaaacatgacgcccagagatcttggcgcatgtattgactgtaatgcaaggcatatcaatgcccaagtagcaaaaagtcacaatgtttcactcatctggaatgtaaaagactacatgtctttatctgaacagctgcgtaaacaaattcgtagtgctgccaagaagaacaacataccttttagactaacttgtgctacaactagacaggttgtcaatgtcataactactaaaatctcactcaagggtggtaagattgttagtacttgttttaaacttatgcttaaggccacattattgtgcgttcttgctgcattggtttgttatatcgttatgccagtacatacattgtcaatccatgatggttacacaaatgaaatcattggttacaaagccattcaggatggtgtcactcgtgacatcatttctactgatgattgttttgcaaataaacatgctggttttgacgcatggtttagccagcgtggtggttcatacaaaaatgacaaaagctgccctgtagtagctgctatcattacaagagagattggtttcatagtgcctggcttaccgggtactgtgctgagagcaatcaatggtgacttcttgcattttctacctcgtgtttttagtgctgttggcaacatttgctacacaccttccaaactcattgagtatagtgattttgctacctctgcttgcgttcttgctgctgagtgtacaatttttaaggatgctatgggcaaacctgtgccatattgttatgacactaatttgctagagggttctatttcttatagtgagcttcgtccagacactcgttatgtgcttatggatggttccatcatacagtttcctaacacttacctggagggttctgttagagtagtaacaacttttgatgctgagtactgtagacatggtacatgcgaaaggtcagaagtaggtatttgcctatctaccagtggtagatgggttcttaataatgagcattacagagctctatcaggagttttctgtggtgttgatgcgatgaatctcatagctaacatctttactcctcttgtgcaacctgtgggtgctttagatgtgtctgcttcagtagtggctggtggtattattgccatattggtgacttgtgctgcctactactttatgaaattcagacgtgtttttggtgagtacaaccatgttgttgctgctaatgcacttttgtttttgatgtctttcactatactctgtctggtaccagcttacagctttctgccgggagtctactcagtcttttacttgtacttgacattctatttcaccaatgatgtttcattcttggctcaccttcaatggtttgccatgttttctcctattgtgcctttttggataacagcaatctatgtattctgtatttctctgaagcactgccattggttctttaacaactatcttaggaaaagagtcatgtttaatggagttacatttagtaccttcgaggaggctgctttgtgtacctttttgctcaacaaggaaatgtacctaaaattgcgtagcgagacactgttgccacttacacagtataacaggtatcttgctctatataacaagtacaagtatttcagtggagccttagatactaccagctatcgtgaagcagcttgctgccacttagcaaaggctctaaatgactttagcaactcaggtgctgatgttctctaccaaccaccacagacatcaatcacttctgctgttctgcagagtggttttaggaaaatggcattcccgtcaggcaaagttgaagggtgcatggtacaagtaacctgtggaactacaactcttaatggattgtggttggatgacacagtatactgtccaagacatgtcatttgcacagcagaagacatgcttaatcctaactatgaagatctgctcattcgcaaatccaaccatagctttcttgttcaggctggcaatgttcaacttcgtgttattggccattctatgcaaaattgtctgcttaggcttaaagttgatacttctaaccctaagacacccaagtataaatttgtccgtatccaacctggtcaaacattttcagttctagcatgctacaatggttcaccatctggtgtttatcagtgtgccatgagacctaatcataccattaaaggttctttccttaatggatcatgtggtagtgttggttttaacattgattatgattgcgtgtctttctgctatatgcatcatatggagcttccaacaggagtacacgctggtactgacttagaaggtaaattctatggtccatttgttgacagacaaactgcacaggctgcaggtacagacacaaccataacattaaatgttttggcatggctgtatgctgctgttatcaatggtgataggtggtttcttaatagattcaccactactttgaatgactttaaccttgtggcaatgaagtacaactatgaacctttgacacaagatcatgttgacatattgggacctctttctgctcaaacaggaattgccgtcttagatatgtgtgctgctttgaaagagctgctgcagaatggtatgaatggtcgtactatccttggtagcactattttagaagatgagtttacaccatttgatgttgttagacaatgctctggtgttaccttccaaggtaagttcaagaaaattgttaagggcactcatcattggatgcttttaactttcttgacatcactattgattcttgttcaaagtacacagtggtcactgtttttctttgtttacgagaatgctttcttgccatttactcttggtattatggcaattgctgcatgtgctatgctgcttgttaagcataagcacgcattcttgtgcttgtttctgttaccttctcttgcaacagttgcttactttaatatggtctacatgcctgctagctgggtgatgcgtatcatgacatggcttgaattggctgacactagcttgtctggttataggcttaaggattgtgttatgtatgcttcagctttagttttgcttattctcatgacagctcgcactgtttatgatgatgctgctagacgtgtttggacactgatgaatgtcattacacttgtttacaaagtctactatggtaatgctttagatcaagctatttccatgtgggccttagttatttctgtaacctctaactattctggtgtcgttacgactatcatgtttttagctagagctatagtgtttgtgtgtgttgagtattacccattgttatttattactggcaacaccttacagtgtatcatgcttgtttattgtttcttaggctattgttgctgctgctactttggccttttctgtttactcaaccgttacttcaggcttactcttggtgtttatgactacttggtctctacacaagaatttaggtatatgaactcccaggggcttttgcctcctaagagtagtattgatgctttcaagcttaacattaagttgttgggtattggaggtaaaccatgtatcaaggttgctactgtacagtctaaaatgtctgacgtaaagtgcacatctgtggtactgctctcggttcttcaacaacttagagtagagtcatcttctaaattgtgggcacaatgtgtacaactccacaatgatattcttcttgcaaaagacacaactgaagctttcgagaagatggtttctcttttgtctgttttgctatccatgcagggtgctgtagacattaataggttgtgcgaggaaatgctcgataaccgtgctactcttcaggctattgcttcagaatttagttctttaccatcatatgccgcttatgccactgcccaggaggcctatgagcaggctgtagctaatggtgattctgaagtcgttctcaaaaagttaaagaaatctttgaatgtggctaaatctgagtttgaccgtgatgctgccatgcaacgcaagttggaaaagatggcagatcaggctatgacccaaatgtacaaacaggcaagatctgaggacaagagggcaaaagtaactagtgctatgcaaacaatgctcttcactatgcttaggaagcttgataatgatgcacttaacaacattatcaacaatgcgcgtgatggttgtgttccactcaacatcataccattgactacagcagccaaactcatggttgttgtccctgattatggtacctacaagaacacttgtgatggtaacacctttacatatgcatctgcactctgggaaatccagcaagttgttgatgcggatagcaagattgttcaacttagtgaaattaacatggacaattcaccaaatttggcttggcctcttattgttacagctctaagagccaactcagctgttaaactacagaataatgaactgagtccagtagcactacgacagatgtcctgtgcggctggtaccacacaaacagcttgtactgatgacaatgcacttgcctactataacaattcgaagggaggtaggtttgtgctggcattactatcagaccaccaagatctcaaatgggctagattccctaagagtgatggtacaggtacaatttacacagaactggaaccaccttgtaggtttgttacagacacaccaaaagggcctaaagtgaaatacttgtacttcatcaaaggcttaaacaacctaaatagaggtatggtgctgggcagtttagctgctacagtacgtcttcaggctggaaatgctacagaagtacctgccaattcaactgtgctttccttctgtgcttttgcagtagaccctgctaaagcatataaggattacctagcaagtggaggacaaccaatcaccaactgtgtgaagatgttgtgtacacacactggtacaggacaggcaattactgtaacaccagaagctaacatggaccaagagtcctttggtggtgcttcatgttgtctgtattgtagatgccacattgaccatccaaatcctaaaggattctgtgacttgaaaggtaagtacgtccaaatacctaccacttgtgctaatgacccagtgggttttacacttagaaacacagtctgtaccgtctgcggaatgtggaaaggttatggctgtagttgtgaccaactccgcgaacccttgatgcagtctgcggatgcatcaacgtttttaaacgggtttgcggtgtaagtgcagcccgtcttacaccgtgcggcacaggcactagtactgatgtcgtctacagggcttttgatatttacaacgaaaaagttgctggttttgcaaagttcctaaaaactaattgctgtcgcttccaggagaaggatgaggaaggcaatttattagactcttactttgtagttaagaggcatactatgtctaactaccaacatgaagagactatttataacttggttaaagattgtccagcggttgctgtccatgactttttcaagtttagagtagatggtgacatggtaccacatatatcacgtcagcgtctaactaaatacacaatggctgatttagtctatgctctacgtcattttgatgagggtaattgtgatacattaaaagaaatactcgtcacatacaattgctgtgatgatgattatttcaataagaaggattggtatgacttcgtagagaatcctgacatcttacgcgtatatgctaacttaggtgagcgtgtacgccaatcattattaaagactgtacaattctgcgatgctatgcgtgatgcaggcattgtaggcgtactgacattagataatcaggatcttaatgggaactggtacgatttcggtgatttcgtacaagtagcaccaggctgcggagttcctattgtggattcatattactcattgctgatgcccatcctcactttgactagggcattggctgctgagtcccatatggatgctgatctcgcaaaaccacttattaagtgggatttgctgaaatatgattttacggaagagagactttgtctcttcgaccgttattttaaatattgggaccagacataccatcccaattgtattaactgtttggatgataggtgtatccttcattgtgcaaactttaatgtgttattttctactgtgtttccacctacaagttttggaccactagtaagaaaaatatttgtagatggtgttccttttgttgtttcaactggataccattttcgtgagttaggagtcgtacataatcaggatgtaaacttacatagctcgcgtctcagtttcaaggaacttttagtgtatgctgctgatccagctatgcatgcagcttctggcaatttattgctagataaacgcactacatgcttttcagtagctgcactaacaaacaatgttgcttttcaaactgtcaaacccggtaattttaataaagacttttatgactttgctgtgtctaaaggtttctttaaggaaggaagttctgttgaactaaaacacttcttctttgctcaggatggcaacgctgctatcagtgattatgactattatcgttataatctgccaacaatgtgtgatatcagacaactcctattcgtagttgaagttgttgataaatactttgattgttacgatggtggctgtattaatgccaaccaagtaatcgttaacaatctggataaatcagctggtttcccatttaataaatggggtaaggctagactttattatgactcaatgagttatgaggatcaagatgcacttttcgcgtatactaagcgtaatgtcatccctactataactcaaatgaatcttaagtatgccattagtgcaaagaatagagctcgcaccgtagctggtgtctctatctgtagtactatgacaaatagacagtttcatcagaaattattgaagtcaatagccgccactagaggagctactgtggtaattggaacaagcaagttttacggtggctggcataatatgttaaaaactgtttacagtgatgtagaaactccacaccttatgggttgggattatccaaaatgtgacagagccatgcctaacatgcttaggataatggcctctcttgttcttgctcgcaaacataacacttgctgtaacttatcacaccgtttctacaggttagctaacgagtgtgcgcaagtattaagtgagatggtcatgtgtggcggctcactatatgttaaaccaggtggaacatcatccggtgatgctacaactgcttatgctaatagtgtctttaacatttgtcaagctgttacagccaatgtaaatgcacttctttcaactgatggtaataagatagctgacaagtatgtccgcaatctacaacacaggctctatgagtgtctctatagaaatagggatgttgatcatgaattcgtggatgagttttacgcttacctgcgtaaacatttctccatgatgattctttctgatgatgccgttgtgtgctataacagtaactatgcggctcaaggtttagtagctagcattaagaactttaaggcagttctttattatcaaaataatgtgttcatgtctgaggcaaaatgttggactgagactgaccttactaaaggacctcacgaattttgctcacagcatacaatgctagttaaacaaggagatgattacgtgtacctgccttacccagatccatcaagaatattaggcgcaggctgttttgtcgatgatattgtcaaaacagatggtacacttatgattgaaaggttcgtgtcactggctattgatgcttacccacttacaaaacatcctaatcaggagtatgctgatgtctttcacttgtatttacaatacattagaaagttacatgatgagcttactggccacatgttggacatgtattccgtaatgctaactaatgataacacctcacggtactgggaacctgagttttatgaggctatgtacacaccacatacagtcttgcaggctgtaggtgcttgtgtattgtgcaattcacagacttcacttcgttgcggtgcctgtattaggagaccattcctatgttgcaagtgctgctatgaccatgtcatttcaacatcacacaaattagtgttgtctgttaatccctatgtttgcaatgccccaggttgtgatgtcactgatgtgacacaactgtatctaggaggtatgagctattattgcaagtcacataagcctcccattagttttccattatgtgctaatggtcaggtttttggtttatacaaaaacacatgtgtaggcagtgacaatgtcactgacttcaatgcgatagcaacatgtgattggactaatgctggcgattacatacttgccaacacttgtactgagagactcaagcttttcgcagcagaaacgctcaaagccactgaggaaacatttaagctgtcatatggtattgctactgtacgcgaagtactctctgacagagaattgcatctttcatgggaggttggaaaacctagaccaccattgaacagaaactatgtctttactggttaccgtgtaactaaaaatagtaaagtacagattggagagtacacctttgaaaaaggtgactatggtgatgctgttgtgtacagaggtactacgacatacaagttgaatgttggtgattactttgtgttgacatctcacactgtaatgccacttagtgcacctactctagtgccacaagagcactatgtgagaattactggcttgtacccaacactcaacatctcagatgagttttctagcaatgttgcaaattatcaaaaggtcggcatgcaaaagtactctacactccaaggaccacctggtactggtaagagtcattttgccatcggacttgctctctattacccatctgctcgcatagtgtatacggcatgctctcatgcagctgttgatgccctatgtgaaaaggcattaaaatatttgcccatagataaatgtagtagaatcatacctgcgcgtgcgcgcgtagagtgttttgataaattcaaagtgaattcaacactagaacagtatgttttctgcactgtaaatgcattgccagaaacaactgctgacattgtagtctttgatgaaatctctatggctactaattatgacttgagtgttgtcaatgctagacttcgtgcaaaacactacgtctatattggcgatcctgctcaattaccagccccccgcacattgctgactaaaggcacactagaaccagaatattttaattcagtgtgcagacttatgaaaacaataggtccagacatgttccttggaacttgtcgccgttgtcctgctgaaattgttgacactgtgagtgctttagtttatgacaataagctaaaagcacacaaggataagtcagctcaatgcttcaaaatgttctacaaaggtgttattacacatgatgtttcatctgcaatcaacagacctcaaataggcgttgtaagagaatttcttacacgcaatcctgcttggagaaaagctgtttttatctcaccttataattcacagaacgctgtagcttcaaaaatcttaggattgcctacgcagactgttgattcatcacagggttctgaatatgactatgtcatattcacacaaactactgaaacagcacactcttgtaatgtcaaccgcttcaatgtggctatcacaagggcaaaaattggcattttgtgcataatgtctgatagagatctttatgacaaactgcaatttacaagtctagaaataccacgtcgcaatgtggctacattacaagcagaaaatgtaactggactttttaaggactgtagtaagatcattactggtcttcatcctacacaggcacctacacacctcagcgttgatataaagttcaagactgaaggattatgtgttgacataccaggcataccaaaggacatgacctaccgtagactcatctctatgatgggtttcaaaatgaattaccaagtcaatggttaccctaatatgtttatcacccgcgaagaagctattcgtcacgttcgtgcgtggattggctttgatgtagagggctgtcatgcaactagagatgctgtgggtactaacctacctctccagctaggattttctacaggtgttaacttagtagctgtaccgactggttatgttgacactgaaaataacacagaattcaccagagttaatgcaaaacctccaccaggtgaccagtttaaacatcttataccactcatgtataaaggcttgccctggaatgtagtgcgtattaagatagtacaaatgctcagtgatacactgaaaggattgtcagacagagtcgtgttcgtcctttgggcgcatggctttgagcttacatcaatgaagtactttgtcaagattggacctgaaagaacgtgttgtctgtgtgacaaacgtgcaacttgcttttctacttcatcagatacttatgcctgctggaatcattctgtgggttttgactatgtctataacccatttatgattgatgttcagcagtggggctttacgggtaaccttcagagtaaccatgaccaacattgccaggtacatggaaatgcacatgtggctagttgtgatgctatcatgactagatgtttagcagtccatgagtgctttgttaagcgcgttgattggtctgttgaataccctattataggagatgaactgagggttaattctgcttgcagaaaagtacaacacatggttgtgaagtctgcattgcttgctgataagtttccagttcttcatgacattggaaatccaaaggctatcaagtgtgtgcctcaggctgaagtagaatggaagttctacgatgctcagccatgtagtgacaaagcttacaaaatagaggagctcttctattcttatgctacacatcacgataaattcactgatggtgtttgtttgttttggaattgtaacgttgatcgttacccagccaatgcaattgtgtgtaggtttgacacaagagccttgtcaaacttgaacttaccaggctgtgatggtggtagtttgtatgtgaataagcatgcattccacactccagctttcgataaaagtgcatttactaatttaaagcaattgcctttcttttactattctgatagtccttgtgagtctcatggcaaacaagtagtgtcggatattgattatgttccactcaaatctgctacgtgtattacacgatgcaatttaggtggtgctgtttgcagacaccatgcaaatgagtaccgacagtacttggatgcatataatatgatgatttctgctggatttagcctatggatttacaaacaatttgatacttataacctgtggaatacatttaccaggttacagagtttagaaaatgtggcttataatgttgttaataaaggacactttgatggacacgccggcgaagcacctgtttccatcattaataatgctgtttacacaaaggtagatggtattgatgtggagatctttgaaaataagacaacacttcctgttaatgttgcatttgagctttgggctaagcgtaacattaaaccagtgccagagattaagatactcaataatttgggtgttgatatcgctgctaatactgtaatctgggactacaaaagagaagccccagcacatgtatctacaataggtgtctgcacaatgactgacattgccaagaaacctactgagagtgcttgttcttcacttactgtcttgtttgatggtagagtggaaggacaggtagacctttttagaaacgcccgtaatggtgttttaataacagaaggttcagtcaaaggtctaacaccttcaaagggaccagcacaagctagcgtcaatggagtcacattaattggagaatcagtaaaaacacagtttaactactttaagaaagtagacggcattattcaacagttgcctgaaacctactttactcagagcagagacttagaggattttaagcccagatcacaaatggaaactgactttctcgagctcgctatggatgaattcatacagcgatataagctcgagggctatgccttcgaacacatcgtttatggagatttcagtcatggacaacttggcggtcttcatttaatgataggcttagccaagcgctcacaagattcaccacttaaattagaggattttatccctatggacagcacagtgaaaaattacttcataacagatgcgcaaacaggttcatcaaaatgtgtgtgttctgtgattgatcttttacttgatgactttgtcgagataataaagtcacaagatttgtcagtgatttcaaaagtggtcaaggttacaattgactatgctgaaatttcattcatgctttggtgtaaggatggacatgttgaaaccttctacccaaaactacaagcaagtcaagcgtggcaaccaggtgttgcgatgcctaacttgtacaagatgcaaagaatgcttcttgaaaagtgtgaccttcagaattatggtgaaaatgctgttataccaaaaggaataatgatgaatgtcgcaaagtatactcaactgtgtcaatacttaaatacacttactttagctgtaccctacaacatgagagttattcactttggtgctggctctgataaaggagttgcaccaggtacagctgtgctcagacaatggttgccaactggcacactacttgtcgattcagatcttaatgacttcgtctccgacgcagattctactttaattggagactgtgcaacagtacatacggctaataaatgggaccttattattagcgatatgtatgaccctaggaccaaacatgtgacaaaagagaatgactctaaagaagggtttttcacttatctgtgtggatttataaagcaaaaactagccctgggtggttctatagctgtaaagataacagagcattcttggaatgctgacctttacaagcttatgggccatttctcatggtggacagcttttgttacaaatgtaaatgcatcatcatcggaagcatttttaattggggctaactatcttggcaagccgaaggaacaaattgatggctataccatgcatgctaactacattttctggaggaacacaaatcctatccagttgtcttcctattcactctttgacatgagcaaatttcctcttaaattaagaggaactgctgtaatgtctcttaaggagaatcaaatcaatgatatgatttattctcttctggaaaaaggtaggcttatcattagagaaaacaacagagttgtggtttcaagtgatattcttgttaacaactaaacgaacatgtttattttcttattatttcttactctcactagtggtagtgaccttgaccggtgcaccacttttgatgatgttcaagctcctaattacactcaacatacttcatctatgaggggggtttactatcctgatgaaatttttagatcagacactctttatttaactcaggatttatttcttccattttattctaatgttacagggtttcatactattaatcatacgtttggcaaccctgtcataccttttaaggatggtatttattttgctgccacagagaaatcaaatgttgtccgtggttgggtttttggttctaccatgaacaacaagtcacagtcggtgattattattaacaattctactaatgttgttatacgagcatgtaactttgaattgtgtgacaaccctttctttgctgtttctaaacccatgggtacacagacacatactatgatattcgataatgcatttaattgcactttcgagtacatatctgatgccttttcgcttgatgtttcagaaaagtcaggtaattttaaacacttacgagagtttgtgtttaaaaataaagatgggtttctctatgtttataagggctatcaacctatagatgtagttcgtgatctaccttctggttttaacactttgaaacctatttttaagttgcctcttggtattaacattacaaattttagagccattcttacagccttttcacctgctcaagacatttggggcacgtcagctgcagcctattttgttggctatttaaagccaactacatttatgctcaagtatgatgaaaatggtacaatcacagatgctgttgattgttctcaaaatccacttgctgaactcaaatgctctgttaagagctttgagattgacaaaggaatttaccagacctctaatttcagggttgttccctcaggagatgttgtgagattccctaatattacaaacttgtgtccttttggagaggtttttaatgctactaaattcccttctgtctatgcatgggagagaaaaaaaatttctaattgtgttgctgattactctgtgctctacaactcaacatttttttcaacctttaagtgctatggcgtttctgccactaagttgaatgatctttgcttctccaatgtctatgcagattcttttgtagtcaagggagatgatgtaagacaaatagcgccaggacaaactggtgttattgctgattataattataaattgccagatgatttcatgggttgtgtccttgcttggaatactaggaacattgatgctacttcaactggtaattataattataaatataggtatcttagacatggcaagcttaggccctttgagagagacatatctaatgtgcctttctcccctgatggcaaaccttgcaccccacctgctcttaattgttattggccattaaatgattatggtttttacaccactactggcattggctaccaaccttacagagttgtagtactttcttttgaacttttaaatgcaccggccacggtttgtggaccaaaattatccactgaccttattaagaaccagtgtgtcaattttaattttaatggactcactggtactggtgtgttaactccttcttcaaagagatttcaaccatttcaacaatttggccgtgatgtttctgatttcactgattccgttcgagatcctaaaacatctgaaatattagacatttcaccttgctcttttgggggtgtaagtgtaattacacctggaacaaatgcttcatctgaagttgctgttctatatcaagatgttaactgcactgatgtttctacagcaattcatgcagatcaactcacaccagcttggcgcatatattctactggaaacaatgtattccagactcaagcaggctgtcttataggagctgagcatgtcgacacttcttatgagtgcgacattcctattggagctggcatttgtgctagttaccatacagtttctttattacgtagtactagccaaaaatctattgtggcttatactatgtctttaggtgctgatagttcaattgcttactctaataacaccattgctatacctactaacttttcaattagcattactacagaagtaatgcctgtttctatggctaaaacctccgtagattgtaatatgtacatctgcggagattctactgaatgtgctaatttgcttctccaatatggtagcttttgcacacaactaaatcgtgcactctcaggtattgctgctgaacaggatcgcaacacacgtgaagtgttcgctcaagtcaaacaaatgtacaaaaccccaactttgaaatattttggtggttttaatttttcacaaatattacctgaccctctaaagccaactaagaggtcttttattgaggacttgctctttaataaggtgacactcgctgatgctggcttcatgaagcaatatggcgaatgcctaggtgatattaatgctagagatctcatttgtgcgcagaagttcaatggacttacagtgttgccacctctgctcactgatgatatgattgctgcctacactgctgctctagttagtggtactgccactgctggatggacatttggtgctggcgctgctcttcaaataccttttgctatgcaaatggcatataggttcaatggcattggagttacccaaaatgttctctatgagaaccaaaaacaaatcgccaaccaatttaacaaggcgattagtcaaattcaagaatcacttacaacaacatcaactgcattgggcaagctgcaagacgttgttaaccagaatgctcaagcattaaacacacttgttaaacaacttagctctaattttggtgcaatttcaagtgtgctaaatgatatcctttcgcgacttgataaagtcgaggcggaggtacaaattgacaggttaattacaggcagacttcaaagccttcaaacctatgtaacacaacaactaatcagggctgctgaaatcagggcttctgctaatcttgctgctactaaaatgtctgagtgtgttcttggacaatcaaaaagagttgacttttgtggaaagggctaccaccttatgtccttcccacaagcagccccgcatggtgttgtcttcctacatgtcacgtatgtgccatcccaggagaggaacttcaccacagcgccagcaatttgtcatgaaggcaaagcatacttccctcgtgaaggtgtttttgtgtttaatggcacttcttggtttattacacagaggaacttcttttctccacaaataattactacagacaatacatttgtctcaggaaattgtgatgtcgttattggcatcattaacaacacagtttatgatcctctgcaacctgagctcgactcattcaaagaagagctggacaagtacttcaaaaatcatacatcaccagatgttgatcttggcgacatttcaggcattaacgcttctgtcgtcaacattcaaaaagaaattgaccgcctcaatgaggtcgctaaaaatttaaatgaatcactcattgaccttcaagaattgggaaaatatgagcaatatattaaatggccttggtatgtttggctcggcttcattgctggactaattgccatcgtcatggttacaatcttgctttgttgcatgactagttgttgcagttgcctcaagggtgcatgctcttgtggttcttgctgcaagtttgatgaggatgactctgagccagttctcaagggtgtcaaattacattacacataaacgaacttatggatttgtttatgagattttttactcttggatcaattactgcacagccagtaaaaattgacaatgcttctcctgcaagtactgttcatgctacagcaacgataccgctacaagcctcactccctttcggatggcttgttattggcgttgcatttcttgctgtttttcagagcgctaccaaaataattgcgctcaataaaagatggcagctagccctttataagggcttccagttcatttgcaatttactgctgctatttgttaccatctattcacatcttttgcttgtcgctgcaggtatggaggcgcaatttttgtacctctatgccttgatatattttctacaatgcatcaacgcatgtagaattattatgagatgttggctttgttggaagtgcaaatccaagaacccattactttatgatgccaactactttgtttgctggcacacacataactatgactactgtataccatataacagtgtcacagatacaattgtcgttactgaaggtgacggcatttcaacaccaaaactcaaagaagactaccaaattggtggttattctgaggataggcactcaggtgttaaagactatgtcgttgtacatggctatttcaccgaagtttactaccagcttgagtctacacaaattactacagacactggtattgaaaatgctacattcttcatctttaacaagcttgttaaagacccaccgaatgtgcaaatacacacaatcgacggctcttcaggagttgctaatccagcaatggatccaatttatgatgagccgacgacgactactagcgtgcctttgtaagcacaagaaagtgagtacgaacttatgtactcattcgtttcggaagaaacaggtacgttaatagttaatagcgtacttctttttcttgctttcgtggtattcttgctagtcacactagccatccttactgcgcttcgattgtgtgcgtactgctgcaatattgttaacgtgagtttagtaaaaccaacggtttacgtctactcgcgtgttaaaaatctgaactcttctgaaggagttcctgatcttctggtctaaacgaactaactattattattattctgtttggaactttaacattgcttatcatggcagacaacggtactattaccgttgaggagcttaaacaactcctggaacaatggaacctagtaataggtttcctattcctagcctggattatgttactacaatttgcctattctaatcggaacaggtttttgtacataataaagcttgttttcctctggctcttgtggccagtaacacttgcttgttttgtgcttgctgctgtctacagaattaattgggtgactggcgggattgcgattgcaatggcttgtattgtaggcttgatgtggcttagctacttcgttgcttccttcaggctgtttgctcgtacccgctcaatgtggtcattcaacccagaaacaaacattcttctcaatgtgcctctccgggggacaattgtgaccagaccgctcatggaaagtgaacttgtcattggtgctgtgatcattcgtggtcacttgcgaatggccggacaccccctagggcgctgtgacattaaggacctgccaaaagagatcactgtggctacatcacgaacgctttcttattacaaattaggagcgtcgcagcgtgtaggcactgattcaggttttgctgcatacaaccgctaccgtattggaaactataaattaaatacagaccacgccggtagcaacgacaatattgctttgctagtacagtaagtgacaacagatgtttcatcttgttgacttccaggttacaatagcagagatattgattatcattatgaggactttcaggattgctatttggaatcttgacgttataataagttcaatagtgagacaattatttaagcctctaactaagaagaattattcggagttagatgatgaagaacctatggagttagattatccataaaacgaacatgaaaattattctcttcctgacattgattgtatttacatcttgcgagctatatcactatcaggagtgtgttagaggtacgactgtactactaaaagaaccttgcccatcaggaacatacgagggcaattcaccatttcaccctcttgctgacaataaatttgcactaacttgcactagcacacactttgcttttgcttgtgctgacggtactcgacatacctatcagctgcgtgcaagatcagtttcaccaaaacttttcatcagacaagaggaggttcaacaagagctctactcgccactttttctcattgttgctgctctagtatttttaatactttgcttcaccattaagagaaagacagaatgaatgagctcactttaattgacttctatttgtgctttttagcctttctgctattccttgttttaataatgcttattatattttggttttcactcgaaatccaggatctagaagaaccttgtaccaaagtctaaacgaacatgaaacttctcattgttttgacttgtatttctctatgcagttgcatatgcactgtagtacagcgctgtgcatctaataaacctcatgtgcttgaagatccttgtaaggtacaacactaggggtaatacttatagcactgcttggctttgtgctctaggaaaggttttaccttttcatagatggcacactatggttcaaacatgcacacctaatgttactatcaactgtcaagatccagctggtggtgcgcttatagctaggtgttggtaccttcatgaaggtcaccaaactgctgcatttagagacgtacttgttgttttaaataaacgaacaaattaaaatgtctgataatggaccccaatcaaaccaacgtagtgccccccgcattacatttggtggacccacagattcaactgacaataaccagaatggaggacgcaatggggcaaggccaaaacagcgccgaccccaaggtttacccaataatactgcgtcttggttcacagctctcactcagcatggcaaggaggaacttagattccctcgaggccagggcgttccaatcaacaccaatagtggtccagatgaccaaattggctactaccgaagagctacccgacgagttcgtggtggtgacggcaaaatgaaagagctcagccccagatggtacttctattacctaggaactggcccagaagcttcacttccctacggcgctaacaaagaaggcatcgtatgggttgcaactgagggagccttgaatacacccaaagaccacattggcacccgcaatcctaataacaatgctgccaccgtgctacaacttcctcaaggaacaacattgccaaaaggcttctacgcagagggaagcagaggcggcagtcaagcctcttctcgctcctcatcacgtagtcgcggtaattcaagaaattcaactcctggcagcagtaggggaaattctcctgctcgaatggctagcggaggtggtgaaactgccctcgcgctattgctgctagacagattgaaccagcttgagagcaaagtttctggtaaaggccaacaacaacaaggccaaactgtcactaagaaatctgctgctgaggcatctaaaaagcctcgccaaaaacgtactgccacaaaacagtacaacgtcactcaagcatttgggagacgtggtccagaacaaacccaaggaaatttcggggaccaagacctaatcagacaaggaactgattacaaacattggccgcaaattgcacaatttgctccaagtgcctctgcattctttggaatgtcacgcattggcatggaagtcacaccttcgggaacatggctgacttatcatggagccattaaattggatgacaaagatccacaattcaaagacaacgtcatactgctgaacaagcacattgacgcatacaaaacattcccaccaacagagcctaaaaaggacaaaaagaaaaagactgatgaagctcagcctttgccgcagagacaaaagaagcagcccactgtgactcttcttcctgcggctgacatggatgatttctccagacaacttcaaaattccatgagtggagcttctgctgattcaactcaggcataaacactcatgatgaccacacaaggcagatgggctatgtaaacgttttcgcaattccgtttacgatacatagtctactcttgtgcagaatgaattctcgtaactaaacagcacaagtaggtttagttaactttaatctcacatagcaatctttaatcaatgtgtaacattagggaggacttgaaagagccaccacattttcatcgaggccacgcggagtacgatcgagggtacagtgaataatgctagggagagctgcctatatggaagagccctaatgtgtaaaattaattttagtagtgctatccccatgtgattttaatagcttcttaggagaatgac

SEQ ID NO: 3 - protein, 40 aa, Feline infectious peritonitis virus
MIGGLFLNTLSFVIVINHVIVNNTANVHTTQHENVIVQQH

SEQ ID NO: 4 - DNA, 123 bp, Feline infectious peritonitis virus
atgattggtggactttttcttaacactcttagttttgtaattgttattaaccatgttattgttaataacacagcaaatgtgcatactacacaacatgaaaatgttatagtacaacagcattag

SEQ ID NO: 5 - protein, 71 aa, Feline infectious peritonitis virus
MLSLVSPLLKKSIVIQLFSITVYKFKAKFWYKLPFETRLCIIKHTRPKALSVTKQVKRDYRKIAILNSMRK

SEQ ID NO: 6 - DNA, 216 bp, Feline infectious peritonitis virus
atgctaagcttggtctctcctttattgaagaagtcaatagtcatacagttgtttagtattactgtttacaagtttaaagccaaattttggtataaactaccttttgaaactagactttgtatcattaaacacacaagacccaaagcattaagtgttacaaaacaagtaaagagagattatagaaaaattgccattctaaattccatgcgaaaatga

SEQ ID NO: 7 - protein, 71 aa, Feline infectious peritonitis virus
MDIVKSIDIFVDAVLDELDRAYFAVTLKVEFKTGKLLVCIGFGDTLLEAKDKAYAKLGLSFIEEVNSHTVV

SEQ ID NO: 8 - DNA, 216 bp, Feline infectious peritonitis virus
atggacattgtcaaatctattgacatattcgtagacgctgtacttgacgaacttgaccgtgcatactttgctgtaactcttaaagtagaatttaagactggtaaactacttgtgtgtataggttttggtgacacacttcttgaggctaaggacaaagcgtatgctaagcttggtctctcctttattgaagaagtcaatagtcatacagttgtttag

SEQ ID NO: 9 - protein, 213 aa, Canine coronavirus
MKFVILVLCLSFVNGYGIKRNVQEHDLKDSHEHPTMTWELLEKFVGNTLYITTPQVLALPLGAQIYCDEIEGFQCSWPGYKNYAHDHTDFHFNPSNPFYSFVDTFYVSLGDSADKIYLRVISATSREKMLNIGCHTSFSVNLPIGTQIYHDKDMKLLVEGRHLECAHRIYFVKYCPYHTHGYCFDDKLKVYDLKRVKSRKDFEKISQYQKSEL

SEQ ID NO: 10 - DNA, 642 bp, Canine coronavirus
atgaagtttgtgattcttgtgttgtgtctttcttttgtgaatggatatggaatcaaaagaaatgtgcaagaacatgacctaaaagattcccatgagcatccaaccatgacatgggaactattagaaaaatttgttggaaacaccctttacatcacaacacctcaagtgcttgcactaccattaggtgcacaaatatattgtgatgaaattgaaggatttcaatgttcttggccaggttataaaaattatgcccatgatcatactgattttcatttcaatccctctaatccattctattcctttgtggatactttttatgtttccttaggtgatagtgcggataaaatttatcttagagtgattagtgcaacatctagagagaaaatgttgaatattggttgtcacacatctttctcagtaaaccttccaattggaactcagatttaccatgacaaggacatgaaacttcttgtcgaaggaagacatcttgagtgtgctcacagaatttactttgtgaagtattgtccataccatacacatgggtattgctttgatgacaagctaaaggtctatgatctgaagcgtgtcaaaagcaggaaggattttgagaaaatcagccaatatcagaaaagtgagttgtaa

SEQ ID NO: 11 - protein, 101 aa, Canine coronavirus
MLVFLHAVFITVLILLLIGRLQLLERLLLNHSLNLKTVNNVLGVDSHWLKVNCLQLLKPDCLDFNILHRSLAETRLLKVVLRVIFLVLLGFCCYRLLVTLF

SEQ ID NO: 12 - DNA, 306 bp, Canine coronavirus
atgctcgttttcctccatgctgtgtttattacagttttaatcttactactaattggtagactccaattattagaaagattattacttaatcactctcttaatcttaaaactgtcaataatgttttaggtgtggactcacactggctaaaagtaaattgcttacagctcttgaaaccagactgtcttgattttaacatcttacataggagtttggcagaaaccagattactaaaagtagtacttcgagtaatctttctagttctactagggttttgctgctatagattgttagtcacattattttaa

SEQ ID NO: 13 - protein, 82 aa, Avian infectious bronchitis virus
MNNSKDNPFRGAIARKARIYLREGLDCVYFLNKAGQAEPCPACTSLVFQGKTCEEHIHNNNLLSWQAVKQLEKQTPQRQSLN

SEQ ID NO: 14 - DNA, 249 bp, Avian infectious bronchitis virus
atgaataatagtaaagataatccttttcgcggagcaatagcaagaaaagctcgaatttatctgagagaaggattagattgtgtttactttcttaacaaagcaggacaagcagagccttgtcccgcgtgtacctctctagtattccaagggaaaacttgtgaggaacacatacataataataatcttttgtcatggcaagcggtaaagcagctggaaaaacagacgccccagcgccagtcattaaactag

SEQ ID NO: 15 - protein, 65 aa, Avian infectious bronchitis virus
MKWLTSFGRAVISCYKSLLLTQLRVLDRLILDHGLLRVLTCSRRVLLVQLDLVYRLAYTPTQSLA

SEQ ID NO: 16 - DNA, 198 bp, Avian infectious bronchitis virus
atgaaatggctgactagttttggaagagcagttatttcttgttataaatccctactattaactcaacttagagtgttagataggttaattttagatcacggactactacgcgttttaacgtgtagtaggcgcgtgcttttagttcaattagatttagtttataggttggcgtatacgcccacccaatcgctggcatga

SEQ ID NO: 17 - protein, 57 aa, Avian infectious bronchitis virus
MIQSPTSFLIVLILLWCKLVLSCFREFIIALQQLIQVLLQIINSNLQSRLTLWHSLD

SEQ ID NO: 18 - DNA, 174 bp, Avian infectious bronchitis virus
atgatccaaagtcccacgtccttcctaatagtattaattcttctttggtgtaaacttgtactaagttgttttagagagtttattatagcgctccaacaactaatacaagttttactccaaattatcaatagtaacttacagtctagactgaccctttggcacagtctagactaa

SEQ ID NO: 19 - protein, 64 aa, Avian infectious bronchitis virus
MLNLEVIIETGEQVIQKISFNLQHISSVLNTEVFDPFDYCYYRGGNFWEIESAEDCSGDDEFIE

SEQ ID NO: 20 - DNA, 195 bp, Avian infectious bronchitis virus
atgttaaacttagaagtaattattgaaactggtgagcaagtgattcaaaaaatcagtttcaatttacagcatatttcaagtgtattaaacacagaagtatttgatccctttgactattgttattacagaggaggtaatttttgggaaatagagtcagctgaagattgttcaggtgatgatgaatttattgaataa

SEQ ID NO: 21 - DNA, 15 bp, Artificial Sequence
  Primer
tgctgacggtactcg

SEQ ID NO: 22 - DNA, 15 bp, Artificial Sequence
  Primer
agtacagcgctgtgc

SEQ ID NO: 23 - DNA, 15 bp, Artificial Sequence
  Primer
ccagaccgctcatgg

SEQ ID NO: 24 - DNA, 15 bp, Artificial Sequence
  Primer
gtcacttgcgaatgg

SEQ ID NO: 25 - DNA, 15 bp, Artificial Sequence
  Primer
ctgaaggagttcctg

SEQ ID NO: 26 - DNA, 15 bp, Artificial Sequence
  Primer
gtgctgacggtactc

SEQ ID NO: 27 - DNA, 15 bp, Artificial Sequence
  Primer
acacccaaagaccac

SEQ ID NO: 28 - DNA, 15 bp, Artificial Sequence
  Primer
agcgtgtaggcactg

SEQ ID NO: 29 - DNA, 15 bp, Artificial Sequence
  Primer
atggccggacactcc

SEQ ID NO: 30 - DNA, 15 bp, Artificial Sequence
  Primer
ttcatcgaggccacg

SEQ ID NO: 31 - DNA, 15 bp, Artificial Sequence
  Primer
aatggccggacactc

SEQ ID NO: 32 - DNA, 15 bp, Artificial Sequence
  Primer
gtgaccagaccgctc

SEQ ID NO: 33 - DNA, 15 bp, Artificial Sequence
  Primer
ggcttctacgcagag

SEQ ID NO: 34 - DNA, 15 bp, Artificial Sequence
  Primer
ctgacggtactcgac

SEQ ID NO: 35 - DNA, 15 bp, Artificial Sequence
  Primer
ccgacgagttcgtgg

SEQ ID NO: 36 - DNA, 15 bp, Artificial Sequence
  Primer
tgggagacgtggtcc

SEQ ID NO: 37 - DNA, 15 bp, Artificial Sequence
  Primer
gaccacattggcacc

SEQ ID NO: 38 - DNA, 15 bp, Artificial Sequence
  Primer
tcaactcctggcagc

SEQ ID NO: 39 - DNA, 15 bp, Artificial Sequence
  Primer
ggctcttgtggccag

SEQ ID NO: 40 - DNA, 15 bp, Artificial Sequence
  Primer
tgggttgcaactgag

SEQ ID NO: 41 - DNA, 15 bp, Artificial Sequence
  Primer
tgcgaatggccggac

SEQ ID NO: 42 - DNA, 15 bp, Artificial Sequence
  Primer
gtggtccagatgacc

SEQ ID NO: 43 - DNA, 15 bp, Artificial Sequence
  Primer
agtggtccagatgac

SEQ ID NO: 44 - DNA, 15 bp, Artificial Sequence
  Primer
cacaatcgacggctc

SEQ ID NO: 45 - DNA, 15 bp, Artificial Sequence
  Primer
aactcctggcagcag

SEQ ID NO: 46 - DNA, 15 bp, Artificial Sequence
  Primer
aatgctgccaccgtg

SEQ ID NO: 47 - DNA, 15 bp, Artificial Sequence
  Primer
accttgcccatcagg

SEQ ID NO: 48 - DNA, 15 bp, Artificial Sequence
  Primer
agcaacgataccgct

SEQ ID NO: 49 - DNA, 15 bp, Artificial Sequence
  Primer
agcccactgtgactc

SEQ ID NO: 50 - DNA, 15 bp, Artificial Sequence
  Primer
agaagcagcccactg

SEQ ID NO: 51 - DNA, 15 bp, Artificial Sequence
  Primer
gacccaccgaatgtg

SEQ ID NO: 52 - DNA, 15 bp, Artificial Sequence
  Primer
ctagggcgctgtgac

SEQ ID NO: 53 - DNA, 15 bp, Artificial Sequence
  Primer
gcctttgccgcagag

SEQ ID NO: 54 - DNA, 15 bp, Artificial Sequence
  Primer
atttggtggacccac

SEQ ID NO: 55 - DNA, 15 bp, Artificial Sequence
  Primer
tgatgagccgacgac

SEQ ID NO: 56 - DNA, 15 bp, Artificial Sequence
  Primer
cgggattgcgattgc

SEQ ID NO: 57 - DNA, 15 bp, Artificial Sequence
  Primer
tgctccaagtgcctc

SEQ ID NO: 58 - DNA, 15 bp, Artificial Sequence
  Primer
gcagcccactgtgac

SEQ ID NO: 59 - DNA, 15 bp, Artificial Sequence
  Primer
aatctgctgctgagg

SEQ ID NO: 60 - DNA, 15 bp, Artificial Sequence
  Primer
acacaatcgacggct

SEQ ID NO: 61 - DNA, 15 bp, Artificial Sequence
  Primer
gtcattggtgctgtg

SEQ ID NO: 62 - DNA, 15 bp, Artificial Sequence
  Primer
ttactgcacagccag

SEQ ID NO: 63 - DNA, 15 bp, Artificial Sequence
  Primer
tgaaagagccaccac

SEQ ID NO: 64 - DNA, 15 bp, Artificial Sequence
  Primer
tgtgaccagaccgct

SEQ ID NO: 65 - DNA, 15 bp, Artificial Sequence
  Primer
tacccgacgagttcg

SEQ ID NO: 66 - DNA, 15 bp, Artificial Sequence
  Primer
cgctacaagcctcac

SEQ ID NO: 67 - DNA, 15 bp, Artificial Sequence
  Primer
ccgctcaatgtggtc

SEQ ID NO: 68 - DNA, 15 bp, Artificial Sequence
  Primer
aggtgacggcatttc

SEQ ID NO: 69 - DNA, 15 bp, Artificial Sequence
  Primer
gccggtagcaacgac

SEQ ID NO: 70 - DNA, 15 bp, Artificial Sequence
  Primer
ttgccatcgtcatgg

SEQ ID NO: 71 - DNA, 15 bp, Artificial Sequence
  Primer
accagaccgctcatg

SEQ ID NO: 72 - DNA, 15 bp, Artificial Sequence
  Primer
tgcagttgcctcaag

SEQ ID NO: 73 - DNA, 15 bp, Artificial Sequence
  Primer
tcacgtagtcgcggt

SEQ ID NO: 74 - DNA, 15 bp, Artificial Sequence
  Primer
ccgctaccgtattgg

SEQ ID NO: 75 - DNA, 15 bp, Artificial Sequence
  Primer
accacgccggtagca

SEQ ID NO: 76 - DNA, 15 bp, Artificial Sequence
  Primer
aggccaaactgtcac

SEQ ID NO: 77 - DNA, 15 bp, Artificial Sequence
  Primer
tcagctgcgtgcaag

SEQ ID NO: 78 - DNA, 15 bp, Artificial Sequence
  Primer
tgagccgacgacgac

SEQ ID NO: 79 - DNA, 15 bp, Artificial Sequence
  Primer
tggtgaaactgccct

SEQ ID NO: 80 - DNA, 15 bp, Artificial Sequence
  Primer
acagcgctgtgcatc

SEQ ID NO: 81 - DNA, 15 bp, Artificial Sequence
  Primer
gcagcgtgtaggcac

SEQ ID NO: 82 - DNA, 15 bp, Artificial Sequence
  Primer
tttcagagcgctacc

SEQ ID NO: 83 - DNA, 15 bp, Artificial Sequence
  Primer
cgtcttggttcacag

SEQ ID NO: 84 - DNA, 15 bp, Artificial Sequence
  Primer
gcttcattgctggac

SEQ ID NO: 85 - DNA, 15 bp, Artificial Sequence
  Primer
cgaatggccggacac

SEQ ID NO: 86 - DNA, 15 bp, Artificial Sequence
  Primer
ttgggagacgtggtc

SEQ ID NO: 87 - DNA, 15 bp, Artificial Sequence
  Primer
ctcctgctcgaatgg

SEQ ID NO: 88 - DNA, 15 bp, Artificial Sequence
  Primer
ttccctcgaggccag

SEQ ID NO: 89 - DNA, 15 bp, Artificial Sequence
  Primer
acggctcttcaggag

SEQ ID NO: 90 - DNA, 15 bp, Artificial Sequence
  Primer
aagagctacccgacg

SEQ ID NO: 91 - DNA, 15 bp, Artificial Sequence
  Primer
cagcctttgccgcag

SEQ ID NO: 92 - DNA, 15 bp, Artificial Sequence
  Primer
cgtggtcacttgcga

SEQ ID NO: 93 - DNA, 15 bp, Artificial Sequence
  Primer
acccgacgagttcgt

SEQ ID NO: 94 - DNA, 15 bp, Artificial Sequence
  Primer
gactggcgggattgc

SEQ ID NO: 95 - DNA, 15 bp, Artificial Sequence
  Primer
aggataggcactcag

SEQ ID NO: 96 - DNA, 15 bp, Artificial Sequence
  Primer
aaccttgcccatcag

SEQ ID NO: 97 - DNA, 15 bp, Artificial Sequence
  Primer
tgctgctgaggcatc

SEQ ID NO: 98 - DNA, 15 bp, Artificial Sequence
  Primer
ggcttagctacttcg

SEQ ID NO: 99 - DNA, 15 bp, Artificial Sequence
  Primer
agaccacattggcac

SEQ ID NO: 100 - DNA, 15 bp, Artificial Sequence
  Primer
ctcatcacgtagtcg

SEQ ID NO: 101 - DNA, 15 bp, Artificial Sequence
  Primer
ttaggagcgtcgcag

SEQ ID NO: 102 - DNA, 15 bp, Artificial Sequence
  Primer
agctggtggtgcgct

SEQ ID NO: 103 - DNA, 15 bp, Artificial Sequence
  Primer
gctttgtgctctagg

SEQ ID NO: 104 - DNA, 15 bp, Artificial Sequence
  Primer
aggcatcgtatgggt

SEQ ID NO: 105 - DNA, 15 bp, Artificial Sequence
  Primer
acgactactagcgtg

SEQ ID NO: 106 - DNA, 15 bp, Artificial Sequence
  Primer
caaaacagcgccgac

SEQ ID NO: 107 - DNA, 15 bp, Artificial Sequence
  Primer
gacgagttcgtggtg

SEQ ID NO: 108 - DNA, 15 bp, Artificial Sequence
  Primer
aggtggtgaaactgc

SEQ ID NO: 109 - DNA, 15 bp, Artificial Sequence
  Primer
aggcactgattcagg

SEQ ID NO: 110 - DNA, 15 bp, Artificial Sequence
  Primer
gagctacccgacgag

SEQ ID NO: 111 - DNA, 15 bp, Artificial Sequence
  Primer
ttgcttgtgctgacg

SEQ ID NO: 112 - DNA, 15 bp, Artificial Sequence
  Primer
cttgtggccagtaac

SEQ ID NO: 113 - DNA, 15 bp, Artificial Sequence
  Primer
ttcagagcgctacca

SEQ ID NO: 114 - DNA, 15 bp, Artificial Sequence
  Primer
aggcggcagtcaagc

SEQ ID NO: 115 - DNA, 15 bp, Artificial Sequence
  Primer
tgccatcgtcatggt

SEQ ID NO: 116 - DNA, 15 bp, Artificial Sequence
  Primer
acgcattggcatgga

SEQ ID NO: 117 - DNA, 15 bp, Artificial Sequence
  Primer
acgccggtagcaacg

SEQ ID NO: 118 - DNA, 15 bp, Artificial Sequence
  Primer
gtcacaccttcggga

SEQ ID NO: 119 - DNA, 15 bp, Artificial Sequence
  Primer
cgataccgctacaag

SEQ ID NO: 120 - DNA, 15 bp, Artificial Sequence
  Primer
tgcttggctttgtgc

SEQ ID NO: 121 - DNA, 15 bp, Artificial Sequence
  Primer
actctgagccagttc

SEQ ID NO: 122 - DNA, 15 bp, Artificial Sequence
  Primer
acaccttcgggaaca

SEQ ID NO: 123 - DNA, 15 bp, Artificial Sequence
  Primer
tgcggctgacatgga

SEQ ID NO: 124 - DNA, 15 bp, Artificial Sequence
  Primer
ttcgtggtcacttgc

SEQ ID NO: 125 - DNA, 15 bp, Artificial Sequence
  Primer
tgacggtactcgaca

SEQ ID NO: 126 - DNA, 15 bp, Artificial Sequence
  Primer
gtcgctgcaggtatg

SEQ ID NO: 127 - DNA, 15 bp, Artificial Sequence
  Primer
acgacgactactagc

SEQ ID NO: 128 - DNA, 15 bp, Artificial Sequence
  Primer
ctccaagtgcctctg

SEQ ID NO: 129 - DNA, 15 bp, Artificial Sequence
  Primer
ggtcaccaaactgct

SEQ ID NO: 130 - DNA, 15 bp, Artificial Sequence
  Primer
catggaagtcacacc

SEQ ID NO: 131 - DNA, 15 bp, Artificial Sequence
  Primer
taccgaagagctacc

SEQ ID NO: 132 - DNA, 15 bp, Artificial Sequence
  Primer
gcttgtgctgacggt

SEQ ID NO: 133 - DNA, 15 bp, Artificial Sequence
  Primer
cacaccttcgggaac

SEQ ID NO: 134 - DNA, 15 bp, Artificial Sequence
  Primer
actccctagggcgct

SEQ ID NO: 135 - DNA, 15 bp, Artificial Sequence
  Primer
catttggtggaccca

SEQ ID NO: 136 - DNA, 15 bp, Artificial Sequence
  Primer
ggctacatcacgaac

SEQ ID NO: 137 - DNA, 15 bp, Artificial Sequence
  Primer
gttctcaagggtgtc

SEQ ID NO: 138 - DNA, 15 bp, Artificial Sequence
  Primer
accccaaggtttacc

SEQ ID NO: 139 - DNA, 15 bp, Artificial Sequence
  Primer
catcgtatgggttgc

SEQ ID NO: 140 - DNA, 15 bp, Artificial Sequence
  Primer
ccttcgggaacatgg

SEQ ID NO: 141 - DNA, 15 bp, Artificial Sequence
  Primer
actgcgcttcgattg

SEQ ID NO: 142 - DNA, 15 bp, Artificial Sequence
  Primer
tgaccagaccgctca

SEQ ID NO: 143 - DNA, 15 bp, Artificial Sequence
  Primer
catgctacagcaacg

SEQ ID NO: 144 - DNA, 15 bp, Artificial Sequence
  Primer
agaccacgccggtag

SEQ ID NO: 145 - DNA, 15 bp, Artificial Sequence
  Primer
agacccaccgaatgt

SEQ ID NO: 146 - DNA, 15 bp, Artificial Sequence
  Primer
ttgtgctgacggtac

SEQ ID NO: 147 - DNA, 15 bp, Artificial Sequence
  Primer
ggataggcactcagg

SEQ ID NO: 148 - DNA, 15 bp, Artificial Sequence
  Primer
cttcctgcggctgac

SEQ ID NO: 149 - DNA, 15 bp, Artificial Sequence
  Primer
aggatgactctgagc

SEQ ID NO: 150 - DNA, 15 bp, Artificial Sequence
  Primer
ccaccaacagagcct

SEQ ID NO: 151 - DNA, 15 bp, Artificial Sequence
  Primer
gtgaaactgccctcg

SEQ ID NO: 152 - DNA, 15 bp, Artificial Sequence
  Primer
ggtcattcaacccag

SEQ ID NO: 153 - DNA, 15 bp, Artificial Sequence
  Primer
tcggggaccaagacc

SEQ ID NO: 154 - DNA, 15 bp, Artificial Sequence
  Primer
gcactgtagtacagc

SEQ ID NO: 155 - DNA, 15 bp, Artificial Sequence
  Primer
ggtgaaactgccctc

SEQ ID NO: 156 - DNA, 15 bp, Artificial Sequence
  Primer
gctacatcacgaacg

SEQ ID NO: 157 - DNA, 15 bp, Artificial Sequence
  Primer
cggagtacgatcgag

SEQ ID NO: 158 - DNA, 15 bp, Artificial Sequence
  Primer
acaatcgacggctct

SEQ ID NO: 159 - DNA, 15 bp, Artificial Sequence
  Primer
acgtctactcgcgtg

SEQ ID NO: 160 - DNA, 15 bp, Artificial Sequence
  Primer
cgactactagcgtgc

SEQ ID NO: 161 - DNA, 15 bp, Artificial Sequence
  Primer
cctgcggctgacatg

SEQ ID NO: 162 - DNA, 15 bp, Artificial Sequence
  Primer
cctcatcacgtagtc

SEQ ID NO: 163 - DNA, 15 bp, Artificial Sequence
  Primer
tcacaccttcgggaa

SEQ ID NO: 164 - DNA, 15 bp, Artificial Sequence
  Primer
ggtatgtttggctcg

SEQ ID NO: 165 - DNA, 15 bp, Artificial Sequence
  Primer
gagctgcctatatgg

SEQ ID NO: 166 - DNA, 15 bp, Artificial Sequence
  Primer
agcctttgccgcaga

SEQ ID NO: 167 - DNA, 15 bp, Artificial Sequence
  Primer
agagctacccgacga

SEQ ID NO: 168 - DNA, 15 bp, Artificial Sequence
  Primer
gaccccaatcaaacc

SEQ ID NO: 169 - DNA, 15 bp, Artificial Sequence
  Primer
tctcactcagcatgg

SEQ ID NO: 170 - DNA, 15 bp, Artificial Sequence
  Primer
cgtcgcagcgtgtag

SEQ ID NO: 171 - DNA, 15 bp, Artificial Sequence
  Primer
agaccgctcatggaa

SEQ ID NO: 172 - DNA, 15 bp, Artificial Sequence
  Primer
gtggtcacttgcgaa

SEQ ID NO: 173 - DNA, 15 bp, Artificial Sequence
  Primer
tccatgagtggagct

SEQ ID NO: 174 - DNA, 15 bp, Artificial Sequence
  Primer
ctgctcgaatggcta

SEQ ID NO: 175 - DNA, 15 bp, Artificial Sequence
  Primer
gatgagccgacgacg

SEQ ID NO: 176 - DNA, 15 bp, Artificial Sequence
  Primer
taccgctacaagcct

SEQ ID NO: 177 - DNA, 15 bp, Artificial Sequence
  Primer
attaggagcgtcgca

SEQ ID NO: 178 - DNA, 15 bp, Artificial Sequence
  Primer
cgattgtgtgcgtac

SEQ ID NO: 179 - DNA, 15 bp, Artificial Sequence
  Primer
ttcgtggtggtgacg

SEQ ID NO: 180 - DNA, 15 bp, Artificial Sequence
  Primer
tgctcgtacccgctc

SEQ ID NO: 181 - DNA, 15 bp, Artificial Sequence
  Primer
cgaagagctacccga

SEQ ID NO: 182 - DNA, 15 bp, Artificial Sequence
  Primer
agcgtcgcagcgtgt

SEQ ID NO: 183 - DNA, 15 bp, Artificial Sequence
  Primer
gacgtggtccagaac

SEQ ID NO: 184 - DNA, 15 bp, Artificial Sequence
  Primer
ctccctttcggatgg

SEQ ID NO: 185 - DNA, 15 bp, Artificial Sequence
  Primer
accttcgggaacatg

SEQ ID NO: 186 - DNA, 15 bp, Artificial Sequence
  Primer
tggaggacgcaatgg

SEQ ID NO: 187 - DNA, 15 bp, Artificial Sequence
  Primer
caccttcgggaacat

SEQ ID NO: 188 - DNA, 15 bp, Artificial Sequence
  Primer
tttcatcgaggccac

SEQ ID NO: 189 - DNA, 15 bp, Artificial Sequence
  Primer
cccaaggtttaccca

SEQ ID NO: 190 - DNA, 15 bp, Artificial Sequence
  Primer
cactgtggctacatc

SEQ ID NO: 191 - DNA, 15 bp, Artificial Sequence
  Primer
acgtggtccagaaca

SEQ ID NO: 192 - DNA, 15 bp, Artificial Sequence
  Primer
ccttgcccatcagga

SEQ ID NO: 193 - DNA, 15 bp, Artificial Sequence
  Primer
gccagggcgttccaa

SEQ ID NO: 194 - DNA, 15 bp, Artificial Sequence
  Primer
gggattgcgattgca

SEQ ID NO: 195 - DNA, 15 bp, Artificial Sequence
  Primer
ccacgccggtagcaa

SEQ ID NO: 196 - DNA, 15 bp, Artificial Sequence
  Primer
agccatccttactgc

SEQ ID NO: 197 - DNA, 15 bp, Artificial Sequence
  Primer
tctgagccagttctc

SEQ ID NO: 198 - DNA, 15 bp, Artificial Sequence
  Primer
gcaacgataccgcta

SEQ ID NO: 199 - DNA, 15 bp, Artificial Sequence
  Primer
agggcgctgtgacat

SEQ ID NO: 200 - DNA, 15 bp, Artificial Sequence
  Primer
ccaaaacagcgccga

SEQ ID NO: 201 - DNA, 15 bp, Artificial Sequence
  Primer
gactctgagccagtt

SEQ ID NO: 202 - DNA, 15 bp, Artificial Sequence
  Primer
cgtgcctttgtaagc

SEQ ID NO: 203 - DNA, 15 bp, Artificial Sequence
  Primer
tcaggctgtttgctc

SEQ ID NO: 204 - DNA, 15 bp, Artificial Sequence
  Primer
cctacggcgctaaca

SEQ ID NO: 205 - DNA, 15 bp, Artificial Sequence
  Primer
gccgacgacgactac

SEQ ID NO: 206 - DNA, 15 bp, Artificial Sequence
  Primer
agctgcgtgcaagat

SEQ ID NO: 207 - DNA, 15 bp, Artificial Sequence
  Primer
caggctgtttgctcg

SEQ ID NO: 208 - DNA, 15 bp, Artificial Sequence
  Primer
cagaccacgccggta

SEQ ID NO: 209 - DNA, 15 bp, Artificial Sequence
  Primer
ttcaactcctggcag

SEQ ID NO: 210 - DNA, 15 bp, Artificial Sequence
  Primer
tacagcgctgtgcat

SEQ ID NO: 211 - DNA, 15 bp, Artificial Sequence
  Primer
tcacactagccatcc

SEQ ID NO: 212 - DNA, 15 bp, Artificial Sequence
  Primer
tacgatcgagggtac

SEQ ID NO: 213 - DNA, 15 bp, Artificial Sequence
  Primer
ggtgacggcatttca

SEQ ID NO: 214 - DNA, 15 bp, Artificial Sequence
  Primer
gctgctgaggcatct

SEQ ID NO: 215 - DNA, 15 bp, Artificial Sequence
  Primer
gaccagaccgctcat

SEQ ID NO: 216 - DNA, 15 bp, Artificial Sequence
  Primer
atcagctgcgtgcaa

SEQ ID NO: 217 - DNA, 15 bp, Artificial Sequence
  Primer
cttgtgctgacggta

SEQ ID NO: 218 - DNA, 15 bp, Artificial Sequence
  Primer
ctcaatgaggtcgct

SEQ ID NO: 219 - DNA, 15 bp, Artificial Sequence
  Primer
cctatcagctgcgtg

SEQ ID NO: 220 - DNA, 15 bp, Artificial Sequence
  Primer
ccaacggtttacgtc

SEQ ID NO: 221 - DNA, 15 bp, Artificial Sequence
  Primer
catacaaccgctacc

SEQ ID NO: 222 - DNA, 15 bp, Artificial Sequence
  Primer
tcaatgtgcctctcc

SEQ ID NO: 223 - DNA, 15 bp, Artificial Sequence
  Primer
aagacccaccgaatg

SEQ ID NO: 224 - DNA, 15 bp, Artificial Sequence
  Primer
tggctagcggaggtg

SEQ ID NO: 225 - DNA, 15 bp, Artificial Sequence
  Primer
agcatttgggagacg

SEQ ID NO: 226 - DNA, 15 bp, Artificial Sequence
  Primer
tgcaactgagggagc

SEQ ID NO: 227 - DNA, 15 bp, Artificial Sequence
  Primer
cctagggcgctgtga

SEQ ID NO: 228 - DNA, 15 bp, Artificial Sequence
  Primer
ccctacggcgctaac

SEQ ID NO: 229 - DNA, 15 bp, Artificial Sequence
  Primer
aagctcagcctttgc

SEQ ID NO: 230 - DNA, 15 bp, Artificial Sequence
  Primer
gaagagctacccgac

SEQ ID NO: 231 - DNA, 15 bp, Artificial Sequence
  Primer
tggacccacagattc

SEQ ID NO: 232 - DNA, 15 bp, Artificial Sequence
  Primer
gctacccgacgagtt

SEQ ID NO: 233 - DNA, 15 bp, Artificial Sequence
  Primer
caccaacagagccta

SEQ ID NO: 234 - DNA, 15 bp, Artificial Sequence
  Primer
gtcttggttcacagc

SEQ ID NO: 235 - DNA, 15 bp, Artificial Sequence
  Primer
ctatcagctgcgtgc

SEQ ID NO: 236 - DNA, 15 bp, Artificial Sequence
  Primer
gaagcagcccactgt

SEQ ID NO: 237 - DNA, 15 bp, Artificial Sequence
  Primer
tggttcacagctctc

SEQ ID NO: 238 - DNA, 15 bp, Artificial Sequence
  Primer
tgcttctcctgcaag

SEQ ID NO: 239 - DNA, 15 bp, Artificial Sequence
  Primer
cattggcacccgcaa

SEQ ID NO: 240 - DNA, 15 bp, Artificial Sequence
  Primer
cacgtagtcgcggta

SEQ ID NO: 241 - DNA, 15 bp, Artificial Sequence
  Primer
gatggcacactatgg

SEQ ID NO: 242 - DNA, 15 bp, Artificial Sequence
  Primer
tgctagggagagctg

SEQ ID NO: 243 - DNA, 15 bp, Artificial Sequence
  Primer
gccgaccccaaggtt

SEQ ID NO: 244 - DNA, 15 bp, Artificial Sequence
  Primer
gcgggattgcgattg

SEQ ID NO: 245 - DNA, 15 bp, Artificial Sequence
  Primer
ctacccgacgagttc

SEQ ID NO: 246 - DNA, 15 bp, Artificial Sequence
  Primer
tatgatgagccgacg

SEQ ID NO: 247 - DNA, 15 bp, Artificial Sequence
  Primer
tctcctgctcgaatg

SEQ ID NO: 248 - DNA, 15 bp, Artificial Sequence
  Primer
agcatggcaaggagg

SEQ ID NO: 249 - DNA, 15 bp, Artificial Sequence
  Primer
cctggcagcagtagg

SEQ ID NO: 250 - DNA, 15 bp, Artificial Sequence
  Primer
tgctatccccatgtg

SEQ ID NO: 251 - DNA, 15 bp, Artificial Sequence
  Primer
tagggagagctgcct

SEQ ID NO: 252 - DNA, 15 bp, Artificial Sequence
  Primer
acacaaggcagatgg

SEQ ID NO: 253 - DNA, 15 bp, Artificial Sequence
  Primer
tcctggcagcagtag

SEQ ID NO: 254 - DNA, 15 bp, Artificial Sequence
  Primer
ctaggaactggccca

SEQ ID NO: 255 - DNA, 15 bp, Artificial Sequence
  Primer
gtcgcagcgtgtagg

SEQ ID NO: 256 - DNA, 15 bp, Artificial Sequence
  Primer
tactgcacagccagt

SEQ ID NO: 257 - DNA, 15 bp, Artificial Sequence
  Primer
caaacattggccgca

SEQ ID NO: 258 - DNA, 15 bp, Artificial Sequence
  Primer
gaaggcatcgtatgg

SEQ ID NO: 259 - DNA, 15 bp, Artificial Sequence
  Primer
tttggtggacccaca

SEQ ID NO: 260 - DNA, 15 bp, Artificial Sequence
  Primer
gagatcactgtggct

SEQ ID NO: 261 - DNA, 15 bp, Artificial Sequence
  Primer
caaggcagatgggct

SEQ ID NO: 262 - DNA, 15 bp, Artificial Sequence
  Primer
agacgtggtccagaa

SEQ ID NO: 263 - DNA, 15 bp, Artificial Sequence
  Primer
gacggctcttcagga

SEQ ID NO: 264 - DNA, 15 bp, Artificial Sequence
  Primer
ccctttcggatggct

SEQ ID NO: 265 - DNA, 15 bp, Artificial Sequence
  Primer
tcaagcctcttctcg

SEQ ID NO: 266 - DNA, 15 bp, Artificial Sequence
  Primer
gcggagtacgatcga

SEQ ID NO: 267 - DNA, 15 bp, Artificial Sequence
  Primer
ctgctgctgaggcat

SEQ ID NO: 268 - DNA, 15 bp, Artificial Sequence
  Primer
gtttgctggcacaca

SEQ ID NO: 269 - DNA, 15 bp, Artificial Sequence
  Primer
ccgctacaagcctca

SEQ ID NO: 270 - DNA, 15 bp, Artificial Sequence
  Primer
gctggtggtgcgctt

SEQ ID NO: 271 - DNA, 15 bp, Artificial Sequence
  Primer
ctgcaggtatggagg

SEQ ID NO: 272 - DNA, 15 bp, Artificial Sequence
  Primer
gatgactctgagcca

SEQ ID NO: 273 - DNA, 15 bp, Artificial Sequence
  Primer
agccgacgacgacta

SEQ ID NO: 274 - DNA, 15 bp, Artificial Sequence
  Primer
acgcggagtacgatc

SEQ ID NO: 275 - DNA, 15 bp, Artificial Sequence
  Primer
tggtggacccacaga

SEQ ID NO: 276 - DNA, 15 bp, Artificial Sequence
  Primer
caccaatagtggtcc

SEQ ID NO: 277 - DNA, 15 bp, Artificial Sequence
  Primer
cttactgcgcttcga

SEQ ID NO: 278 - DNA, 15 bp, Artificial Sequence
  Primer
ttgcttgtcgctgca

SEQ ID NO: 279 - DNA, 15 bp, Artificial Sequence
  Primer
ggtgcgcttatagct

SEQ ID NO: 280 - DNA, 15 bp, Artificial Sequence
  Primer
caatcgacggctctt

SEQ ID NO: 281 - DNA, 15 bp, Artificial Sequence
  Primer
cagggcgttccaatc

SEQ ID NO: 282 - DNA, 15 bp, Artificial Sequence
  Primer
gctacaagcctcact

SEQ ID NO: 283 - DNA, 15 bp, Artificial Sequence
  Primer
ggcacactatggttc

SEQ ID NO: 284 - DNA, 15 bp, Artificial Sequence
  Primer
agcctcttctcgctc

SEQ ID NO: 285 - DNA, 15 bp, Artificial Sequence
  Primer
gatgaagctcagcct

SEQ ID NO: 286 - DNA, 15 bp, Artificial Sequence
  Primer
gaatggccggacact

SEQ ID NO: 287 - DNA, 15 bp, Artificial Sequence
  Primer
tctgaggataggcac

SEQ ID NO: 288 - DNA, 15 bp, Artificial Sequence
  Primer
gaccccaaggtttac

SEQ ID NO: 289 - DNA, 15 bp, Artificial Sequence
  Primer
agggcgttccaatca

SEQ ID NO: 290 - DNA, 15 bp, Artificial Sequence
  Primer
tagggcgctgtgaca

SEQ ID NO: 291 - DNA, 15 bp, Artificial Sequence
  Primer
gcacccgcaatccta

SEQ ID NO: 292 - DNA, 15 bp, Artificial Sequence
  Primer
cttccctacggcgct

SEQ ID NO: 293 - DNA, 15 bp, Artificial Sequence
  Primer
ttgcccatcaggaac

SEQ ID NO: 294 - DNA, 15 bp, Artificial Sequence
  Primer
cttggttcacagctc

SEQ ID NO: 295 - DNA, 15 bp, Artificial Sequence
  Primer
ctacaagcctcactc

SEQ ID NO: 296 - DNA, 15 bp, Artificial Sequence
  Primer
ctgtttgctcgtacc

SEQ ID NO: 297 - DNA, 15 bp, Artificial Sequence
  Primer
gttgcagttgcctca

SEQ ID NO: 298 - DNA, 15 bp, Artificial Sequence
  Primer
gcgtcttggttcaca

SEQ ID NO: 299 - DNA, 15 bp, Artificial Sequence
  Primer
atcgagggtacagtg

SEQ ID NO: 300 - DNA, 15 bp, Artificial Sequence
  Primer
tacaagcctcactcc

SEQ ID NO: 301 - DNA, 15 bp, Artificial Sequence
  Primer
aatggctagcggagg

SEQ ID NO: 302 - DNA, 15 bp, Artificial Sequence
  Primer
ctcttgtggccagta

SEQ ID NO: 303 - DNA, 15 bp, Artificial Sequence
  Primer
ggaacatggctgact

SEQ ID NO: 304 - DNA, 15 bp, Artificial Sequence
  Primer
ccagaatggaggacg

SEQ ID NO: 305 - DNA, 15 bp, Artificial Sequence
  Primer
gaaccagcttgagag

SEQ ID NO: 306 - DNA, 15 bp, Artificial Sequence
  Primer
actagcgtgcctttg

SEQ ID NO: 307 - DNA, 15 bp, Artificial Sequence
  Primer
ctattcctagcctgg

SEQ ID NO: 308 - DNA, 15 bp, Artificial Sequence
  Primer
agcgctgtgcatcta

SEQ ID NO: 309 - DNA, 15 bp, Artificial Sequence
  Primer
atgagccgacgacga

SEQ ID NO: 310 - DNA, 15 bp, Artificial Sequence
  Primer
ggcagacaacggtac

SEQ ID NO: 311 - DNA, 15 bp, Artificial Sequence
  Primer
gacgactactagcgt

SEQ ID NO: 312 - DNA, 15 bp, Artificial Sequence
  Primer
gaagtcacaccttcg

SEQ ID NO: 313 - DNA, 15 bp, Artificial Sequence
  Primer
tgactctgagccagt

SEQ ID NO: 314 - DNA, 15 bp, Artificial Sequence
  Primer
ggaagagccctaatg

SEQ ID NO: 315 - DNA, 15 bp, Artificial Sequence
  Primer
ggttcacagctctca

SEQ ID NO: 316 - DNA, 15 bp, Artificial Sequence
  Primer
accgctaccgtattg

SEQ ID NO: 317 - DNA, 15 bp, Artificial Sequence
  Primer
tgactggcgggattg

SEQ ID NO: 318 - DNA, 15 bp, Artificial Sequence
  Primer
tgcgtgcaagatcag

SEQ ID NO: 319 - DNA, 15 bp, Artificial Sequence
  Primer
ttgcaactgagggag

SEQ ID NO: 320 - DNA, 15 bp, Artificial Sequence
  Primer
gctaggtgttggtac

SEQ ID NO: 321 - DNA, 15 bp, Artificial Sequence
  Primer
ccttactgcgcttcg

SEQ ID NO: 322 - DNA, 15 bp, Artificial Sequence
  Primer
gttcacagctctcac

SEQ ID NO: 323 - DNA, 15 bp, Artificial Sequence
  Primer
tggagcttctgctga

SEQ ID NO: 324 - DNA, 15 bp, Artificial Sequence
  Primer
ctcaatgtgcctctc

SEQ ID NO: 325 - DNA, 15 bp, Artificial Sequence
  Primer
tgagggagccttgaa

SEQ ID NO: 326 - DNA, 15 bp, Artificial Sequence
  Primer
gctcttgtggccagt

SEQ ID NO: 327 - DNA, 15 bp, Artificial Sequence
  Primer
ctgagggagccttga

SEQ ID NO: 328 - DNA, 15 bp, Artificial Sequence
  Primer
tgtttggctcggctt

SEQ ID NO: 329 - DNA, 15 bp, Artificial Sequence
  Primer
agctcagccccagat

SEQ ID NO: 330 - DNA, 15 bp, Artificial Sequence
  Primer
cgatcgagggtacag

SEQ ID NO: 331 - DNA, 15 bp, Artificial Sequence
  Primer
aacaatgctgccacc

SEQ ID NO: 332 - DNA, 15 bp, Artificial Sequence
  Primer
ggaccccaatcaaac

SEQ ID NO: 333 - DNA, 15 bp, Artificial Sequence
  Primer
ttgcgaatggccgga

SEQ ID NO: 334 - DNA, 15 bp, Artificial Sequence
  Primer
gtcaagcctcttctc

SEQ ID NO: 335 - DNA, 15 bp, Artificial Sequence
  Primer
tacgcagagggaagc

SEQ ID NO: 336 - DNA, 15 bp, Artificial Sequence
  Primer
ctactaccgaagagc

SEQ ID NO: 337 - DNA, 15 bp, Artificial Sequence
  Primer
gtggtgcgcttatag

SEQ ID NO: 338 - DNA, 15 bp, Artificial Sequence
  Primer
gctatccccatgtga

SEQ ID NO: 339 - DNA, 15 bp, Artificial Sequence
  Primer
tcttcctgcggctga

SEQ ID NO: 340 - DNA, 15 bp, Artificial Sequence
  Primer
aatgctagggagagc

SEQ ID NO: 341 - DNA, 15 bp, Artificial Sequence
  Primer
cctcgccaaaaacgt

SEQ ID NO: 342 - DNA, 15 bp, Artificial Sequence
  Primer
ggtggacccacagat

SEQ ID NO: 343 - DNA, 15 bp, Artificial Sequence
  Primer
gggtgcatgctcttg

SEQ ID NO: 344 - DNA, 15 bp, Artificial Sequence
  Primer
gctcggcttcattgc

SEQ ID NO: 345 - DNA, 15 bp, Artificial Sequence
  Primer
caatgctgccaccgt

SEQ ID NO: 346 - DNA, 15 bp, Artificial Sequence
  Primer
agtacgatcgagggt

SEQ ID NO: 347 - DNA, 15 bp, Artificial Sequence
  Primer
cgcagagggaagcag

SEQ ID NO: 348 - DNA, 15 bp, Artificial Sequence
  Primer
ttctacgcagaggga

SEQ ID NO: 349 - DNA, 15 bp, Artificial Sequence
  Primer
gccctcgcgctattg

SEQ ID NO: 350 - DNA, 15 bp, Artificial Sequence
  Primer
cggggaccaagacct

SEQ ID NO: 351 - DNA, 15 bp, Artificial Sequence
  Primer
tcagcctttgccgca

SEQ ID NO: 352 - DNA, 15 bp, Artificial Sequence
  Primer
aagcagaggcggcag

SEQ ID NO: 353 - DNA, 15 bp, Artificial Sequence
  Primer
tgctcgaatggctag

SEQ ID NO: 354 - DNA, 15 bp, Artificial Sequence
  Primer
cccagatggtacttc

SEQ ID NO: 355 - DNA, 15 bp, Artificial Sequence
  Primer
tacaaccgctaccgt

SEQ ID NO: 356 - DNA, 15 bp, Artificial Sequence
  Primer
cttggctttgtgctc

SEQ ID NO: 357 - DNA, 15 bp, Artificial Sequence
  Primer
gaccacacaaggcag

SEQ ID NO: 358 - DNA, 15 bp, Artificial Sequence
  Primer
ggaactggcccagaa

SEQ ID NO: 359 - DNA, 15 bp, Artificial Sequence
  Primer
ctggcgggattgcga

SEQ ID NO: 360 - DNA, 15 bp, Artificial Sequence
  Primer
gacggtactcgacat

SEQ ID NO: 361 - DNA, 15 bp, Artificial Sequence
  Primer
aagaagcagcccact

SEQ ID NO: 362 - DNA, 15 bp, Artificial Sequence
  Primer
cgctcatggaaagtg

SEQ ID NO: 363 - DNA, 15 bp, Artificial Sequence
  Primer
gcgaatggccggaca

SEQ ID NO: 364 - DNA, 15 bp, Artificial Sequence
  Primer
gcatttgggagacgt

SEQ ID NO: 365 - DNA, 15 bp, Artificial Sequence
  Primer
gcctcttctcgctcc

SEQ ID NO: 366 - DNA, 15 bp, Artificial Sequence
  Primer
ctcgctcctcatcac

SEQ ID NO: 367 - DNA, 15 bp, Artificial Sequence
  Primer
gcctcgccaaaaacg

SEQ ID NO: 368 - DNA, 15 bp, Artificial Sequence
  Primer
cctttcggatggctt

SEQ ID NO: 369 - DNA, 15 bp, Artificial Sequence
  Primer
acagctctcactcag

SEQ ID NO: 370 - DNA, 15 bp, Artificial Sequence
  Primer
gtcacactagccatc

SEQ ID NO: 371 - DNA, 15 bp, Artificial Sequence
  Primer
caactgagggagcct

SEQ ID NO: 372 - DNA, 15 bp, Artificial Sequence
  Primer
tccttactgcgcttc

SEQ ID NO: 373 - DNA, 15 bp, Artificial Sequence
  Primer
agaatggaggacgca

SEQ ID NO: 374 - DNA, 15 bp, Artificial Sequence
  Primer
ccggacactccctag

SEQ ID NO: 375 - DNA, 15 bp, Artificial Sequence
  Primer
ctgctgaggcatcta

SEQ ID NO: 376 - DNA, 15 bp, Artificial Sequence
  Primer
gaaatttcggggacc

SEQ ID NO: 377 - DNA, 15 bp, Artificial Sequence
  Primer
cctcactccctttcg

SEQ ID NO: 378 - DNA, 15 bp, Artificial Sequence
  Primer
gtgcttgctgctgtc

SEQ ID NO: 379 - DNA, 15 bp, Artificial Sequence
  Primer
gtggccagtaacact

SEQ ID NO: 380 - DNA, 15 bp, Artificial Sequence
  Primer
tttgggagacgtggt

SEQ ID NO: 381 - DNA, 15 bp, Artificial Sequence
  Primer
ggccaaactgtcact

SEQ ID NO: 382 - DNA, 15 bp, Artificial Sequence
  Primer
ctcgtacccgctcaa

SEQ ID NO: 383 - DNA, 15 bp, Artificial Sequence
  Primer
acgcagagggaagca

SEQ ID NO: 384 - DNA, 15 bp, Artificial Sequence
  Primer
ctactagcgtgcctt

SEQ ID NO: 385 - DNA, 15 bp, Artificial Sequence
  Primer
aatcgacggctcttc

SEQ ID NO: 386 - DNA, 15 bp, Artificial Sequence
  Primer
tcactccctttcgga

SEQ ID NO: 387 - DNA, 15 bp, Artificial Sequence
  Primer
gagccgacgacgact

SEQ ID NO: 388 - DNA, 15 bp, Artificial Sequence
  Primer
aaagaagcagcccac

SEQ ID NO: 389 - DNA, 15 bp, Artificial Sequence
  Primer
ctcttctcgctcctc

SEQ ID NO: 390 - DNA, 15 bp, Artificial Sequence
  Primer
ttccctacggcgcta

SEQ ID NO: 391 - DNA, 15 bp, Artificial Sequence
  Primer
gctgctgtctacaga

SEQ ID NO: 392 - DNA, 15 bp, Artificial Sequence
  Primer
agctctactcgccac

SEQ ID NO: 393 - DNA, 15 bp, Artificial Sequence
  Primer
ggtgactggcgggat

SEQ ID NO: 394 - DNA, 15 bp, Artificial Sequence
  Primer
tagcactgcttggct

SEQ ID NO: 395 - DNA, 15 bp, Artificial Sequence
  Primer
gccgcaaattgcaca

SEQ ID NO: 396 - DNA, 15 bp, Artificial Sequence
  Primer
ttgctcgtacccgct

SEQ ID NO: 397 - DNA, 15 bp, Artificial Sequence
  Primer
gctactaccgaagag

SEQ ID NO: 398 - DNA, 15 bp, Artificial Sequence
  Primer
cgaatggctagcgga

SEQ ID NO: 399 - DNA, 15 bp, Artificial Sequence
  Primer
gagctcagccccaga

SEQ ID NO: 400 - DNA, 15 bp, Artificial Sequence
  Primer
tttgccgcagagaca

SEQ ID NO: 401 - DNA, 15 bp, Artificial Sequence
  Primer
cgtctactcgcgtgt

SEQ ID NO: 402 - DNA, 15 bp, Artificial Sequence
  Primer
ggacccacagattca

SEQ ID NO: 403 - DNA, 15 bp, Artificial Sequence
  Primer
atggcagacaacggt

SEQ ID NO: 404 - DNA, 15 bp, Artificial Sequence
  Primer
cagaggcggcagtca

SEQ ID NO: 405 - DNA, 15 bp, Artificial Sequence
  Primer
actccctttcggatg

SEQ ID NO: 406 - DNA, 15 bp, Artificial Sequence
  Primer
accgctcatggaaag

SEQ ID NO: 407 - DNA, 15 bp, Artificial Sequence
  Primer
ggaggtggtgaaact

SEQ ID NO: 408 - DNA, 15 bp, Artificial Sequence
  Primer
cctttgccgcagaga

SEQ ID NO: 409 - DNA, 15 bp, Artificial Sequence
  Primer
gctctcactcagcat

SEQ ID NO: 410 - DNA, 15 bp, Artificial Sequence
  Primer
cacccaaagaccaca

SEQ ID NO: 411 - DNA, 15 bp, Artificial Sequence
  Primer
gttgcaactgaggga

SEQ ID NO: 412 - DNA, 15 bp, Artificial Sequence
  Primer
cgtgctacaacttcc

SEQ ID NO: 413 - DNA, 15 bp, Artificial Sequence
  Primer
agcactgcttggctt

SEQ ID NO: 414 - DNA, 15 bp, Artificial Sequence
  Primer
cacactagccatcct

SEQ ID NO: 415 - DNA, 15 bp, Artificial Sequence
  Primer
gaatggctagcggag

SEQ ID NO: 416 - DNA, 15 bp, Artificial Sequence
  Primer
caggaacatacgagg

SEQ ID NO: 417 - DNA, 15 bp, Artificial Sequence
  Primer
cactcgaaatccagg

SEQ ID NO: 418 - DNA, 15 bp, Artificial Sequence
  Primer
caagtgcctctgcat

SEQ ID NO: 419 - DNA, 15 bp, Artificial Sequence
  Primer
atggaggacgcaatg

SEQ ID NO: 420 - DNA, 15 bp, Artificial Sequence
  Primer
ccccagatggtactt

SEQ ID NO: 421 - DNA, 15 bp, Artificial Sequence
  Primer
tcagacaagaggagg

SEQ ID NO: 422 - DNA, 15 bp, Artificial Sequence
  Primer
aagagctcagcccca

SEQ ID NO: 423 - DNA, 15 bp, Artificial Sequence
  Primer
tggcagacaacggta

SEQ ID NO: 424 - DNA, 15 bp, Artificial Sequence
  Primer
atgctagggagagct

SEQ ID NO: 425 - DNA, 15 bp, Artificial Sequence
  Primer
tctacgcagagggaa

SEQ ID NO: 426 - DNA, 15 bp, Artificial Sequence
  Primer
cgtggtccagaacaa

SEQ ID NO: 427 - DNA, 15 bp, Artificial Sequence
  Primer
ggagtacgatcgagg

SEQ ID NO: 428 - DNA, 15 bp, Artificial Sequence
  Primer
gaactggcccagaag

SEQ ID NO: 429 - DNA, 15 bp, Artificial Sequence
  Primer
ctgagccagttctca

SEQ ID NO: 430 - DNA, 15 bp, Artificial Sequence
  Primer
tgcccatcaggaaca

SEQ ID NO: 431 - DNA, 15 bp, Artificial Sequence
  Primer
gctagcggaggtggt

SEQ ID NO: 432 - DNA, 15 bp, Artificial Sequence
  Primer
gacgacgactactag

SEQ ID NO: 433 - DNA, 15 bp, Artificial Sequence
  Primer
aggccacgcggagta

SEQ ID NO: 434 - DNA, 15 bp, Artificial Sequence
  Primer
gaaccttgcccatca

SEQ ID NO: 435 - DNA, 15 bp, Artificial Sequence
  Primer
gctgcaggtatggag

SEQ ID NO: 436 - DNA, 15 bp, Artificial Sequence
  Primer
gcatggcaaggagga

SEQ ID NO: 437 - DNA, 15 bp, Artificial Sequence
  Primer
agtgctatccccatg

SEQ ID NO: 438 - DNA, 15 bp, Artificial Sequence
  Primer
cagctgcgtgcaaga

SEQ ID NO: 439 - DNA, 15 bp, Artificial Sequence
  Primer
gtgctctaggaaagg

SEQ ID NO: 440 - DNA, 15 bp, Artificial Sequence
  Primer
cagcgctgtgcatct

SEQ ID NO: 441 - DNA, 15 bp, Artificial Sequence
  Primer
gcattggcatggaag

SEQ ID NO: 442 - DNA, 15 bp, Artificial Sequence
  Primer
ggctactaccgaaga

SEQ ID NO: 443 - DNA, 15 bp, Artificial Sequence
  Primer
gctgtttgctcgtac

SEQ ID NO: 444 - DNA, 15 bp, Artificial Sequence
  Primer
aagcctcttctcgct

SEQ ID NO: 445 - DNA, 15 bp, Artificial Sequence
  Primer
gcggctgacatggat

SEQ ID NO: 446 - DNA, 15 bp, Artificial Sequence
  Primer
cgcattggcatggaa

SEQ ID NO: 447 - DNA, 15 bp, Artificial Sequence
  Primer
gccggacactcccta

SEQ ID NO: 448 - DNA, 15 bp, Artificial Sequence
  Primer
ccgacgacgactact

SEQ ID NO: 449 - DNA, 15 bp, Artificial Sequence
  Primer
gtttggctcggcttc

SEQ ID NO: 450 - DNA, 15 bp, Artificial Sequence
  Primer
atgatgagccgacga

SEQ ID NO: 451 - DNA, 15 bp, Artificial Sequence
  Primer
gaagcagaggcggca

SEQ ID NO: 452 - DNA, 15 bp, Artificial Sequence
  Primer
tggtggtgacggcaa

SEQ ID NO: 453 - DNA, 15 bp, Artificial Sequence
  Primer
cacacaaggcagatg

SEQ ID NO: 454 - DNA, 15 bp, Artificial Sequence
  Primer
ggcagcagtagggga

SEQ ID NO: 455 - DNA, 15 bp, Artificial Sequence
  Primer
agggcttccagttca

SEQ ID NO: 456 - DNA, 15 bp, Artificial Sequence
  Primer
cgcaatggggcaagg

SEQ ID NO: 457 - DNA, 15 bp, Artificial Sequence
  Primer
atttgggagacgtgg

SEQ ID NO: 458 - DNA, 15 bp, Artificial Sequence
  Primer
cttcacttccctacg

SEQ ID NO: 459 - DNA, 15 bp, Artificial Sequence
  Primer
tttgcttgtcgctgc

SEQ ID NO: 460 - DNA, 15 bp, Artificial Sequence
  Primer
cgctgcaggtatgga

SEQ ID NO: 461 - DNA, 15 bp, Artificial Sequence
  Primer
gaggatgactctgag

SEQ ID NO: 462 - DNA, 15 bp, Artificial Sequence
  Primer
gaggcggcagtcaag

SEQ ID NO: 463 - DNA, 15 bp, Artificial Sequence
  Primer
ccacacaaggcagat

SEQ ID NO: 464 - DNA, 15 bp, Artificial Sequence
  Primer
cctattcctagcctg

SEQ ID NO: 465 - DNA, 15 bp, Artificial Sequence
  Primer
cgacgacgactacta

SEQ ID NO: 466 - DNA, 15 bp, Artificial Sequence
  Primer
cctgatcttctggtc

SEQ ID NO: 467 - DNA, 15 bp, Artificial Sequence
  Primer
ttcctctggctcttg

SEQ ID NO: 468 - DNA, 15 bp, Artificial Sequence
  Primer
actgccctcgcgcta

SEQ ID NO: 469 - DNA, 15 bp, Artificial Sequence
  Primer
ctacgcagagggaag

SEQ ID NO: 470 - DNA, 15 bp, Artificial Sequence
  Primer
cggaggtggtgaaac

SEQ ID NO: 471 - DNA, 15 bp, Artificial Sequence
  Primer
ccgctcatggaaagt

SEQ ID NO: 472 - DNA, 15 bp, Artificial Sequence
  Primer
gccccagatggtact

SEQ ID NO: 473 - DNA, 15 bp, Artificial Sequence
  Primer
gagctctactcgcca

SEQ ID NO: 474 - DNA, 15 bp, Artificial Sequence
  Primer
caccatttcaccctc

SEQ ID NO: 475 - DNA, 15 bp, Artificial Sequence
  Primer
agcagaggcggcagt

SEQ ID NO: 476 - DNA, 15 bp, Artificial Sequence
  Primer
ctctcactcagcatg

SEQ ID NO: 477 - DNA, 15 bp, Artificial Sequence
  Primer
cctcttctcgctcct

SEQ ID NO: 478 - DNA, 15 bp, Artificial Sequence
  Primer
gacaagaggaggttc

SEQ ID NO: 479 - DNA, 15 bp, Artificial Sequence
  Primer
accacacaaggcaga

SEQ ID NO: 480 - DNA, 15 bp, Artificial Sequence
  Primer
gttttcctctggctc

SEQ ID NO: 481 - DNA, 15 bp, Artificial Sequence
  Primer
gctcgtacccgctca

SEQ ID NO: 482 - DNA, 15 bp, Artificial Sequence
  Primer
aggtatggaggcgca

SEQ ID NO: 483 - DNA, 15 bp, Artificial Sequence
  Primer
acgcaatggggcaag

SEQ ID NO: 484 - DNA, 15 bp, Artificial Sequence
  Primer
gtagtgctatcccca

SEQ ID NO: 485 - DNA, 15 bp, Artificial Sequence
  Primer
gcctcactccctttc

SEQ ID NO: 486 - DNA, 15 bp, Artificial Sequence
  Primer
cggtagcaacgacaa

SEQ ID NO: 487 - DNA, 15 bp, Artificial Sequence
  Primer
ccaccgaatgtgcaa

SEQ ID NO: 488 - DNA, 15 bp, Artificial Sequence
  Primer
gtacgatcgagggta

SEQ ID NO: 489 - DNA, 15 bp, Artificial Sequence
  Primer
cactccctttcggat

SEQ ID NO: 490 - DNA, 15 bp, Artificial Sequence
  Primer
gaatggaggacgcaa

SEQ ID NO: 491 - DNA, 15 bp, Artificial Sequence
  Primer
gtctactcgcgtgtt

SEQ ID NO: 492 - DNA, 15 bp, Artificial Sequence
  Primer
tgcttgctgctgtct

SEQ ID NO: 493 - DNA, 15 bp, Artificial Sequence
  Primer
agtgcctctgcattc

SEQ ID NO: 494 - DNA, 15 bp, Artificial Sequence
  Primer
ctggtaaaggccaac

SEQ ID NO: 495 - DNA, 15 bp, Artificial Sequence
  Primer
actgcgtcttggttc

SEQ ID NO: 496 - DNA, 15 bp, Artificial Sequence
  Primer
ggtatggaggcgcaa

SEQ ID NO: 497 - DNA, 15 bp, Artificial Sequence
  Primer
ctctactcgccactt

SEQ ID NO: 498 - DNA, 15 bp, Artificial Sequence
  Primer
gtgctatccccatgt

SEQ ID NO: 499 - DNA, 15 bp, Artificial Sequence
  Primer
ctagcgtgcctttgt

SEQ ID NO: 500 - DNA, 15 bp, Artificial Sequence
  Primer
acggcgctaacaaag

SEQ ID NO: 501 - DNA, 15 bp, Artificial Sequence
  Primer
tttggctcggcttca

SEQ ID NO: 502 - DNA, 15 bp, Artificial Sequence
  Primer
ggacgcaatggggca

SEQ ID NO: 503 - DNA, 15 bp, Artificial Sequence
  Primer
gcccactgtgactct

SEQ ID NO: 504 - DNA, 15 bp, Artificial Sequence
  Primer
gctctactcgccact

SEQ ID NO: 505 - DNA, 15 bp, Artificial Sequence
  Primer
gatcgagggtacagt

SEQ ID NO: 506 - DNA, 15 bp, Artificial Sequence
  Primer
catggcaaggaggaa

SEQ ID NO: 507 - DNA, 15 bp, Artificial Sequence
  Primer
gaacatacgagggca

SEQ ID NO: 508 - DNA, 15 bp, Artificial Sequence
  Primer
cttctcgctcctcat

SEQ ID NO: 509 - DNA, 15 bp, Artificial Sequence
  Primer
catccttactgcgct

SEQ ID NO: 510 - DNA, 15 bp, Artificial Sequence
  Primer
gcagcagtaggggaa

SEQ ID NO: 511 - DNA, 15 bp, Artificial Sequence
  Primer
cacgcggagtacgat

SEQ ID NO: 512 - DNA, 15 bp, Artificial Sequence
  Primer
tacgtctactcgcgt

SEQ ID NO: 513 - DNA, 15 bp, Artificial Sequence
  Primer
gcttgctgctgtcta

SEQ ID NO: 514 - DNA, 15 bp, Artificial Sequence
  Primer
cttcttcctgcggct

SEQ ID NO: 515 - DNA, 15 bp, Artificial Sequence
  Primer
ctcctcatcacgtag

SEQ ID NO: 516 - DNA, 15 bp, Artificial Sequence
  Primer
gcttcacttccctac

SEQ ID NO: 517 - DNA, 15 bp, Artificial Sequence
  Primer
gacgcaatggggcaa

SEQ ID NO: 518 - DNA, 15 bp, Artificial Sequence
  Primer
ctgcgtcttggttca

SEQ ID NO: 519 - DNA, 15 bp, Artificial Sequence
  Primer
ctgcgcttcgattgt

SEQ ID NO: 520 - DNA, 15 bp, Artificial Sequence
  Primer
gtgcctctgcattct

SEQ ID NO: 521 - DNA, 15 bp, Artificial Sequence
  Primer
tggcacgagtactcc

SEQ ID NO: 522 - DNA, 15 bp, Artificial Sequence
  Primer
tgtacgaaccgtctg

SEQ ID NO: 523 - DNA, 15 bp, Artificial Sequence
  Primer
accgtaagcagtctg

SEQ ID NO: 524 - DNA, 15 bp, Artificial Sequence
  Primer
acgcactagcacgtc

SEQ ID NO: 525 - DNA, 15 bp, Artificial Sequence
  Primer
tgccagtatggcctg

SEQ ID NO: 526 - DNA, 15 bp, Artificial Sequence
  Primer
tcaacgaccttgtgg

SEQ ID NO: 527 - DNA, 15 bp, Artificial Sequence
  Primer
accagctcaacgacc

SEQ ID NO: 528 - DNA, 15 bp, Artificial Sequence
  Primer
tcagagcgctcagtg

SEQ ID NO: 529 - DNA, 15 bp, Artificial Sequence
  Primer
agtgccaagctcgtc

SEQ ID NO: 530 - DNA, 15 bp, Artificial Sequence
  Primer
tcatggtcacggcag

SEQ ID NO: 531 - DNA, 15 bp, Artificial Sequence
  Primer
acactgttggtgagc

SEQ ID NO: 532 - DNA, 15 bp, Artificial Sequence
  Primer
actctaggcttcagg

SEQ ID NO: 533 - DNA, 15 bp, Artificial Sequence
  Primer
acctgtgtacgaacc

SEQ ID NO: 534 - DNA, 15 bp, Artificial Sequence
  Primer
acgttcacgactcag

SEQ ID NO: 535 - DNA, 15 bp, Artificial Sequence
  Primer
tgttgagtgcacctg

SEQ ID NO: 536 - DNA, 15 bp, Artificial Sequence
  Primer
tggccgtgattggtg

SEQ ID NO: 537 - DNA, 15 bp, Artificial Sequence
  Primer
tgagttcacggagtg

SEQ ID NO: 538 - DNA, 15 bp, Artificial Sequence
  Primer
tcaacgggcgtctcg

SEQ ID NO: 539 - DNA, 15 bp, Artificial Sequence
  Primer
gttaccgcaggactc

SEQ ID NO: 540 - DNA, 15 bp, Artificial Sequence
  Primer
tccattgagctcacg

SEQ ID NO: 541 - DNA, 15 bp, Artificial Sequence
  Primer
actggtgtgccgacg

SEQ ID NO: 542 - DNA, 15 bp, Artificial Sequence
  Primer
tagggctgttcaagc

SEQ ID NO: 543 - DNA, 15 bp, Artificial Sequence
  Primer
ttcagctgaggcacc

SEQ ID NO: 544 - DNA, 15 bp, Artificial Sequence
  Primer
acaacctcctcagag

SEQ ID NO: 545 - DNA, 15 bp, Artificial Sequence
  Primer
cgagtactcccagtg

SEQ ID NO: 546 - DNA, 15 bp, Artificial Sequence
  Primer
gccgacgatagctcc

SEQ ID NO: 547 - DNA, 15 bp, Artificial Sequence
  Primer
atcgactgcaacacg

SEQ ID NO: 548 - DNA, 15 bp, Artificial Sequence
  Primer
tgccaagctcgtcac

SEQ ID NO: 549 - DNA, 15 bp, Artificial Sequence
  Primer
cacgagtactcccag

SEQ ID NO: 550 - DNA, 15 bp, Artificial Sequence
  Primer
tagttaccgcaggac

SEQ ID NO: 551 - DNA, 15 bp, Artificial Sequence
  Primer
cgtgcctccgatagg

SEQ ID NO: 552 - DNA, 15 bp, Artificial Sequence
  Primer
acccatctgggccac

SEQ ID NO: 553 - DNA, 15 bp, Artificial Sequence
  Primer
cgaaccgtctgcacg

SEQ ID NO: 554 - DNA, 15 bp, Artificial Sequence
  Primer
ctgtttcagctgagg

SEQ ID NO: 555 - DNA, 15 bp, Artificial Sequence
  Primer
gaggtgttcacgtgc

SEQ ID NO: 556 - DNA, 15 bp, Artificial Sequence
  Primer
tcccttgcggagtcg

SEQ ID NO: 557 - DNA, 15 bp, Artificial Sequence
  Primer
cagtatggcctgagc

SEQ ID NO: 558 - DNA, 15 bp, Artificial Sequence
  Primer
aagtcgcacgtctgc

SEQ ID NO: 559 - DNA, 15 bp, Artificial Sequence
  Primer
gtacgaaccgtctgc

SEQ ID NO: 560 - DNA, 15 bp, Artificial Sequence
  Primer
aagctggatgtcctc

SEQ ID NO: 561 - DNA, 15 bp, Artificial Sequence
  Primer
gcatggcaccattgg

SEQ ID NO: 562 - DNA, 15 bp, Artificial Sequence
  Primer
acctcccttgcggag

SEQ ID NO: 563 - DNA, 15 bp, Artificial Sequence
  Primer
ctgggtcttgacagg

SEQ ID NO: 564 - DNA, 15 bp, Artificial Sequence
  Primer
catggtcacggcagc

SEQ ID NO: 565 - DNA, 15 bp, Artificial Sequence
  Primer
tggtgagcaggtctg

SEQ ID NO: 566 - DNA, 15 bp, Artificial Sequence
  Primer
ccatctgggccacag

SEQ ID NO: 567 - DNA, 15 bp, Artificial Sequence
  Primer
ggagtgcaccactgc

SEQ ID NO: 568 - DNA, 15 bp, Artificial Sequence
  Primer
accgtctgcacgcac

SEQ ID NO: 569 - DNA, 15 bp, Artificial Sequence
  Primer
ggcaccattggttgc

SEQ ID NO: 570 - DNA, 15 bp, Artificial Sequence
  Primer
gctacgaccgtactg

SEQ ID NO: 571 - DNA, 15 bp, Artificial Sequence
  Primer
acgagtgagttcacg

SEQ ID NO: 572 - DNA, 15 bp, Artificial Sequence
  Primer
actgagttggacgtg

SEQ ID NO: 573 - DNA, 15 bp, Artificial Sequence
  Primer
atgctcatggtcacg

SEQ ID NO: 574 - DNA, 15 bp, Artificial Sequence
  Primer
agaagctggatgtcc

SEQ ID NO: 575 - DNA, 15 bp, Artificial Sequence
  Primer
cggagtgcaccactg

SEQ ID NO: 576 - DNA, 15 bp, Artificial Sequence
  Primer
tatcagagcgctcag

SEQ ID NO: 577 - DNA, 15 bp, Artificial Sequence
  Primer
gcaaccagctcaacg

SEQ ID NO: 578 - DNA, 15 bp, Artificial Sequence
  Primer
gcgagtgactgcacc

SEQ ID NO: 579 - DNA, 15 bp, Artificial Sequence
  Primer
gaccttgtggccgtg

SEQ ID NO: 580 - DNA, 15 bp, Artificial Sequence
  Primer
atcaacgggcgtctc

SEQ ID NO: 581 - DNA, 15 bp, Artificial Sequence
  Primer
gttgagtgcacctgc

SEQ ID NO: 582 - DNA, 15 bp, Artificial Sequence
  Primer
gcaactttgcgccag

SEQ ID NO: 583 - DNA, 15 bp, Artificial Sequence
  Primer
agcgagtgactgcac

SEQ ID NO: 584 - DNA, 15 bp, Artificial Sequence
  Primer
tctggtgctcgtagc

SEQ ID NO: 585 - DNA, 15 bp, Artificial Sequence
  Primer
tcacaacagcctctg

SEQ ID NO: 586 - DNA, 15 bp, Artificial Sequence
  Primer
agaaagtcgcacgtc

SEQ ID NO: 587 - DNA, 15 bp, Artificial Sequence
  Primer
gactggtgtgccgac

SEQ ID NO: 588 - DNA, 15 bp, Artificial Sequence
  Primer
ggtccaacaacatgc

SEQ ID NO: 589 - DNA, 15 bp, Artificial Sequence
  Primer
gagttcacggagtgc

SEQ ID NO: 590 - DNA, 15 bp, Artificial Sequence
  Primer
tgagttggacgtgtg

SEQ ID NO: 591 - DNA, 15 bp, Artificial Sequence
  Primer
tgcaacagggtacac

SEQ ID NO: 592 - DNA, 15 bp, Artificial Sequence
  Primer
gcaattggggtttcg

SEQ ID NO: 593 - DNA, 15 bp, Artificial Sequence
  Primer
tcagctgaggcacca

SEQ ID NO: 594 - DNA, 15 bp, Artificial Sequence
  Primer
caacctcctcagagg

SEQ ID NO: 595 - DNA, 15 bp, Artificial Sequence
  Primer
cacagactggtgtgc

SEQ ID NO: 596 - DNA, 15 bp, Artificial Sequence
  Primer
tgcttcgagttcacc

SEQ ID NO: 597 - DNA, 15 bp, Artificial Sequence
  Primer
actgaatgccgtcca

SEQ ID NO: 598 - DNA, 15 bp, Artificial Sequence
  Primer
ctccgatagggcctc

SEQ ID NO: 599 - DNA, 15 bp, Artificial Sequence
  Primer
ccagcagcctgtgag

SEQ ID NO: 600 - DNA, 15 bp, Artificial Sequence
  Primer
cgtaggtgcactagg

SEQ ID NO: 601 - DNA, 15 bp, Artificial Sequence
  Primer
tcagcactagcacga

SEQ ID NO: 602 - DNA, 15 bp, Artificial Sequence
  Primer
agctcaacgaccttg

SEQ ID NO: 603 - DNA, 15 bp, Artificial Sequence
  Primer
tgccttgttgagtgc

SEQ ID NO: 604 - DNA, 15 bp, Artificial Sequence
  Primer
tgcactaggcatgca

SEQ ID NO: 605 - DNA, 15 bp, Artificial Sequence
  Primer
ggtgtctggtgctcg

SEQ ID NO: 606 - DNA, 15 bp, Artificial Sequence
  Primer
accgcaggactcaac

SEQ ID NO: 607 - DNA, 15 bp, Artificial Sequence
  Primer
tgcttccactctagg

SEQ ID NO: 608 - DNA, 15 bp, Artificial Sequence
  Primer
ctcaacgaccttgtg

SEQ ID NO: 609 - DNA, 15 bp, Artificial Sequence
  Primer
cactctaggcttcag

SEQ ID NO: 610 - DNA, 15 bp, Artificial Sequence
  Primer
acgtgcctccgatag

SEQ ID NO: 611 - DNA, 15 bp, Artificial Sequence
  Primer
ggatcagtgccaagc

SEQ ID NO: 612 - DNA, 15 bp, Artificial Sequence
  Primer
ccacattgtcaccag

SEQ ID NO: 613 - DNA, 15 bp, Artificial Sequence
  Primer
agcagtagacacctc

SEQ ID NO: 614 - DNA, 15 bp, Artificial Sequence
  Primer
tgcaaccagctcaac

SEQ ID NO: 615 - DNA, 15 bp, Artificial Sequence
  Primer
agtgcaccactgcca

SEQ ID NO: 616 - DNA, 15 bp, Artificial Sequence
  Primer
gaacccagtaggcac

SEQ ID NO: 617 - DNA, 15 bp, Artificial Sequence
  Primer
atagcgagtgactgc

SEQ ID NO: 618 - DNA, 15 bp, Artificial Sequence
  Primer
gttggtgagcaggtc

SEQ ID NO: 619 - DNA, 15 bp, Artificial Sequence
  Primer
catagcgagtgactg

SEQ ID NO: 620 - DNA, 15 bp, Artificial Sequence
  Primer
cagcactagcacgag

SEQ ID NO: 621 - DNA, 15 bp, Artificial Sequence
  Primer
tctcgagtgcttcga

SEQ ID NO: 622 - DNA, 15 bp, Artificial Sequence
  Primer
atgcagccgagcgac

SEQ ID NO: 623 - DNA, 15 bp, Artificial Sequence
  Primer
caaccagctcaacga

SEQ ID NO: 624 - DNA, 15 bp, Artificial Sequence
  Primer
tcttccacagagtcc

SEQ ID NO: 625 - DNA, 15 bp, Artificial Sequence
  Primer
ccattgagctcacga

SEQ ID NO: 626 - DNA, 15 bp, Artificial Sequence
  Primer
tcggtcacacccgga

SEQ ID NO: 627 - DNA, 15 bp, Artificial Sequence
  Primer
tgtgtacgaaccgtc

SEQ ID NO: 628 - DNA, 15 bp, Artificial Sequence
  Primer
cagcagcctgtgagg

SEQ ID NO: 629 - DNA, 15 bp, Artificial Sequence
  Primer
cctcaactcgaactg

SEQ ID NO: 630 - DNA, 15 bp, Artificial Sequence
  Primer
gcgacagctacacag

SEQ ID NO: 631 - DNA, 15 bp, Artificial Sequence
  Primer
catgctcatggtcac

SEQ ID NO: 632 - DNA, 15 bp, Artificial Sequence
  Primer
tctctgggtcttgac

SEQ ID NO: 633 - DNA, 15 bp, Artificial Sequence
  Primer
tacgaaccgtctgca

SEQ ID NO: 634 - DNA, 15 bp, Artificial Sequence
  Primer
gcctcttccacagag

SEQ ID NO: 635 - DNA, 15 bp, Artificial Sequence
  Primer
aggcatgcagccgag

SEQ ID NO: 636 - DNA, 15 bp, Artificial Sequence
  Primer
aagggtgtctggtgc

SEQ ID NO: 637 - DNA, 15 bp, Artificial Sequence
  Primer
gacactgttggtgag

SEQ ID NO: 638 - DNA, 15 bp, Artificial Sequence
  Primer
tcgagtgcttcgagt

SEQ ID NO: 639 - DNA, 15 bp, Artificial Sequence
  Primer
gactgcaacacggac

SEQ ID NO: 640 - DNA, 15 bp, Artificial Sequence
  Primer
cagtgccaagctcgt

SEQ ID NO: 641 - DNA, 15 bp, Artificial Sequence
  Primer
acccggacgaaacct

SEQ ID NO: 642 - DNA, 15 bp, Artificial Sequence
  Primer
agttaccgcaggact

SEQ ID NO: 643 - DNA, 15 bp, Artificial Sequence
  Primer
gcacgagtactccca

SEQ ID NO: 644 - DNA, 15 bp, Artificial Sequence
  Primer
gtatggcctgagcca

SEQ ID NO: 645 - DNA, 15 bp, Artificial Sequence
  Primer
ggcgtctcgagtgct

SEQ ID NO: 646 - DNA, 15 bp, Artificial Sequence
  Primer
cacgcactagcacgt

SEQ ID NO: 647 - DNA, 15 bp, Artificial Sequence
  Primer
accatggcgtcgaca

SEQ ID NO: 648 - DNA, 15 bp, Artificial Sequence
  Primer
cgctcagtgaaccag

SEQ ID NO: 649 - DNA, 15 bp, Artificial Sequence
  Primer
cattgagctcacgag

SEQ ID NO: 650 - DNA, 15 bp, Artificial Sequence
  Primer
atcatccagccagtc

SEQ ID NO: 651 - DNA, 15 bp, Artificial Sequence
  Primer
ttctgcaaccagctc

SEQ ID NO: 652 - DNA, 15 bp, Artificial Sequence
  Primer
taaaccatggcgtcg

SEQ ID NO: 653 - DNA, 15 bp, Artificial Sequence
  Primer
caacgggcgtctcga

SEQ ID NO: 654 - DNA, 15 bp, Artificial Sequence
  Primer
tcggtaccggattca

SEQ ID NO: 655 - DNA, 15 bp, Artificial Sequence
  Primer
aggcaaacacacagc

SEQ ID NO: 656 - DNA, 15 bp, Artificial Sequence
  Primer
aaccacacagtggtg

SEQ ID NO: 657 - DNA, 15 bp, Artificial Sequence
  Primer
gtgtttggtggctcc

SEQ ID NO: 658 - DNA, 15 bp, Artificial Sequence
  Primer
ctgtgtacgaaccgt

SEQ ID NO: 659 - DNA, 15 bp, Artificial Sequence
  Primer
gcttctgtacgacag

SEQ ID NO: 660 - DNA, 15 bp, Artificial Sequence
  Primer
acttcggtaccggat

SEQ ID NO: 661 - DNA, 15 bp, Artificial Sequence
  Primer
ctcatggtcacggca

SEQ ID NO: 662 - DNA, 15 bp, Artificial Sequence
  Primer
ctatcaacgggcgtc

SEQ ID NO: 663 - DNA, 15 bp, Artificial Sequence
  Primer
cgagtgactgcacct

SEQ ID NO: 664 - DNA, 15 bp, Artificial Sequence
  Primer
ctgacggtaaagtcc

SEQ ID NO: 665 - DNA, 15 bp, Artificial Sequence
  Primer
tgcacctccattgag

SEQ ID NO: 666 - DNA, 15 bp, Artificial Sequence
  Primer
acggagtgcaccact

SEQ ID NO: 667 - DNA, 15 bp, Artificial Sequence
  Primer
tccatgacaacctgc

SEQ ID NO: 668 - DNA, 15 bp, Artificial Sequence
  Primer
gaccgtactgaatgc

SEQ ID NO: 669 - DNA, 15 bp, Artificial Sequence
  Primer
ctcccttgcggagtc

SEQ ID NO: 670 - DNA, 15 bp, Artificial Sequence
  Primer
agactggtgtgccga

SEQ ID NO: 671 - DNA, 15 bp, Artificial Sequence
  Primer
ggtgtaggttctggt

SEQ ID NO: 672 - DNA, 15 bp, Artificial Sequence
  Primer
cgaggttggttggct

SEQ ID NO: 673 - DNA, 15 bp, Artificial Sequence
  Primer
cacatagggctgttc

SEQ ID NO: 674 - DNA, 15 bp, Artificial Sequence
  Primer
accttgtggccgtga

SEQ ID NO: 675 - DNA, 15 bp, Artificial Sequence
  Primer
ctggtgtgccgacga

SEQ ID NO: 676 - DNA, 15 bp, Artificial Sequence
  Primer
tgagtgcacctgcta

SEQ ID NO: 677 - DNA, 15 bp, Artificial Sequence
  Primer
ttgtggccgtgattg

SEQ ID NO: 678 - DNA, 15 bp, Artificial Sequence
  Primer
ttgcgccagcgatag

SEQ ID NO: 679 - DNA, 15 bp, Artificial Sequence
  Primer
cgaaaccgtaagcag

SEQ ID NO: 680 - DNA, 15 bp, Artificial Sequence
  Primer
agtgactgcacctcc

SEQ ID NO: 681 - DNA, 15 bp, Artificial Sequence
  Primer
tacactcctgtggag

SEQ ID NO: 682 - DNA, 15 bp, Artificial Sequence
  Primer
ccttgcggagtcgag

SEQ ID NO: 683 - DNA, 15 bp, Artificial Sequence
  Primer
tggtgctcgtagctc

SEQ ID NO: 684 - DNA, 15 bp, Artificial Sequence
  Primer
tggtcacggcagcag

SEQ ID NO: 685 - DNA, 15 bp, Artificial Sequence
  Primer
ctgatgatcgactgc

SEQ ID NO: 686 - DNA, 15 bp, Artificial Sequence
  Primer
gagtgactgcacctc

SEQ ID NO: 687 - DNA, 15 bp, Artificial Sequence
  Primer
ctcctgtggagatgc

SEQ ID NO: 688 - DNA, 15 bp, Artificial Sequence
  Primer
agttgcagctgctcc

SEQ ID NO: 689 - DNA, 15 bp, Artificial Sequence
  Primer
aacacacagcctcca

SEQ ID NO: 690 - DNA, 15 bp, Artificial Sequence
  Primer
caggtgtaggttctg

SEQ ID NO: 691 - DNA, 15 bp, Artificial Sequence
  Primer
tcagaaagtcgcacg

SEQ ID NO: 692 - DNA, 15 bp, Artificial Sequence
  Primer
gaggaacccagtagg

SEQ ID NO: 693 - DNA, 15 bp, Artificial Sequence
  Primer
tgcgccagcgatagt

SEQ ID NO: 694 - DNA, 15 bp, Artificial Sequence
  Primer
gtctggtgctcgtag

SEQ ID NO: 695 - DNA, 15 bp, Artificial Sequence
  Primer
gcaaacaagaccctc

SEQ ID NO: 696 - DNA, 15 bp, Artificial Sequence
  Primer
agccgagcgacagct

SEQ ID NO: 697 - DNA, 15 bp, Artificial Sequence
  Primer
cctttcggtcacacc

SEQ ID NO: 698 - DNA, 15 bp, Artificial Sequence
  Primer
accagcagcctgtga

SEQ ID NO: 699 - DNA, 15 bp, Artificial Sequence
  Primer
aaaccatggcgtcga

SEQ ID NO: 700 - DNA, 15 bp, Artificial Sequence
  Primer
accgctacgaccgta

SEQ ID NO: 701 - DNA, 15 bp, Artificial Sequence
  Primer
tggggtttcgcccac

SEQ ID NO: 702 - DNA, 15 bp, Artificial Sequence
  Primer
ccagctcaacgacct

SEQ ID NO: 703 - DNA, 15 bp, Artificial Sequence
  Primer
ctcttccacagagtc

SEQ ID NO: 704 - DNA, 15 bp, Artificial Sequence
  Primer
tggtgtgccgacgat

SEQ ID NO: 705 - DNA, 15 bp, Artificial Sequence
  Primer
acgggcgtctcgagt

SEQ ID NO: 706 - DNA, 15 bp, Artificial Sequence
  Primer
gacgaaaccgtaagc

SEQ ID NO: 707 - DNA, 15 bp, Artificial Sequence
  Primer
cagagtccccgaagc

SEQ ID NO: 708 - DNA, 15 bp, Artificial Sequence
  Primer
gctcagtgaaccagg

SEQ ID NO: 709 - DNA, 15 bp, Artificial Sequence
  Primer
taggtgcactaggca

SEQ ID NO: 710 - DNA, 15 bp, Artificial Sequence
  Primer
cctccgatagggcct

SEQ ID NO: 711 - DNA, 15 bp, Artificial Sequence
  Primer
ccccatgaaaccctc

SEQ ID NO: 712 - DNA, 15 bp, Artificial Sequence
  Primer
gctgatgatcgactg

SEQ ID NO: 713 - DNA, 15 bp, Artificial Sequence
  Primer
cacctgctacaccac

SEQ ID NO: 714 - DNA, 15 bp, Artificial Sequence
  Primer
gtcacacccggacga

SEQ ID NO: 715 - DNA, 15 bp, Artificial Sequence
  Primer
tcctgtggagatgca

SEQ ID NO: 716 - DNA, 15 bp, Artificial Sequence
  Primer
gccagtatggcctga

SEQ ID NO: 717 - DNA, 15 bp, Artificial Sequence
  Primer
acacacagcctccaa

SEQ ID NO: 718 - DNA, 15 bp, Artificial Sequence
  Primer
gaagggtgtctggtg

SEQ ID NO: 719 - DNA, 15 bp, Artificial Sequence
  Primer
ttcggtaccggattc

SEQ ID NO: 720 - DNA, 15 bp, Artificial Sequence
  Primer
taggcatgcagccga

SEQ ID NO: 721 - DNA, 15 bp, Artificial Sequence
  Primer
cgagtgcttcgagtt

SEQ ID NO: 722 - DNA, 15 bp, Artificial Sequence
  Primer
ccatggcgtcgacaa

SEQ ID NO: 723 - DNA, 15 bp, Artificial Sequence
  Primer
gtatcatccagccag

SEQ ID NO: 724 - DNA, 15 bp, Artificial Sequence
  Primer
cacgtctgccatgaa

SEQ ID NO: 725 - DNA, 15 bp, Artificial Sequence
  Primer
actgcaacacggacg

SEQ ID NO: 726 - DNA, 15 bp, Artificial Sequence
  Primer
caaacaagaccctcc

SEQ ID NO: 727 - DNA, 15 bp, Artificial Sequence
  Primer
ttaccgcaggactca

SEQ ID NO: 728 - DNA, 15 bp, Artificial Sequence
  Primer
cagggtacacagagc

SEQ ID NO: 729 - DNA, 15 bp, Artificial Sequence
  Primer
atgcctgctgacaac

SEQ ID NO: 730 - DNA, 15 bp, Artificial Sequence
  Primer
cgaccttgtggccgt

SEQ ID NO: 731 - DNA, 15 bp, Artificial Sequence
  Primer
taccgcaggactcaa

SEQ ID NO: 732 - DNA, 15 bp, Artificial Sequence
  Primer
agcgtatacgcccca

SEQ ID NO: 733 - DNA, 15 bp, Artificial Sequence
  Primer
acatgtggcacgagt

SEQ ID NO: 734 - DNA, 15 bp, Artificial Sequence
  Primer
ctggtgctcgtagct

SEQ ID NO: 735 - DNA, 15 bp, Artificial Sequence
  Primer
gcgtaggtgcactag

SEQ ID NO: 736 - DNA, 15 bp, Artificial Sequence
  Primer
cacatgtggcacgag

SEQ ID NO: 737 - DNA, 15 bp, Artificial Sequence
  Primer
cactatgctcaggtc

SEQ ID NO: 738 - DNA, 15 bp, Artificial Sequence
  Primer
cggtaccggattcaa

SEQ ID NO: 739 - DNA, 15 bp, Artificial Sequence
  Primer
atgtggcacgagtac

SEQ ID NO: 740 - DNA, 15 bp, Artificial Sequence
  Primer
agtgagttcacggag

SEQ ID NO: 741 - DNA, 15 bp, Artificial Sequence
  Primer
ggtcttgacaggcag

SEQ ID NO: 742 - DNA, 15 bp, Artificial Sequence
  Primer
gctggatgtcctcac

SEQ ID NO: 743 - DNA, 15 bp, Artificial Sequence
  Primer
tgggatcagtgccaa

SEQ ID NO: 744 - DNA, 15 bp, Artificial Sequence
  Primer
gccagcgatagtgac

SEQ ID NO: 745 - DNA, 15 bp, Artificial Sequence
  Primer
ggcttctgtacgaca

SEQ ID NO: 746 - DNA, 15 bp, Artificial Sequence
  Primer
gggtgtctggtgctc

SEQ ID NO: 747 - DNA, 15 bp, Artificial Sequence
  Primer
gcacctgctacacca

SEQ ID NO: 748 - DNA, 15 bp, Artificial Sequence
  Primer
tactgaatgccgtcc

SEQ ID NO: 749 - DNA, 15 bp, Artificial Sequence
  Primer
ctgcaaccagctcaa

SEQ ID NO: 750 - DNA, 15 bp, Artificial Sequence
  Primer
ccatgacaacctgct

SEQ ID NO: 751 - DNA, 15 bp, Artificial Sequence
  Primer
gtgccaagctcgtca

SEQ ID NO: 752 - DNA, 15 bp, Artificial Sequence
  Primer
ttggtgagcaggtct

SEQ ID NO: 753 - DNA, 15 bp, Artificial Sequence
  Primer
ggcatgagtagttgc

SEQ ID NO: 754 - DNA, 15 bp, Artificial Sequence
  Primer
atggtcacggcagca

SEQ ID NO: 755 - DNA, 15 bp, Artificial Sequence
  Primer
tctgcaaccagctca

SEQ ID NO: 756 - DNA, 15 bp, Artificial Sequence
  Primer
tccgatagggcctct

SEQ ID NO: 757 - DNA, 15 bp, Artificial Sequence
  Primer
taccgctacgaccgt

SEQ ID NO: 758 - DNA, 15 bp, Artificial Sequence
  Primer
cttgacaggcaggac

SEQ ID NO: 759 - DNA, 15 bp, Artificial Sequence
  Primer
gaagccacgcactag

SEQ ID NO: 760 - DNA, 15 bp, Artificial Sequence
  Primer
gcggtatgcaattgg

SEQ ID NO: 761 - DNA, 15 bp, Artificial Sequence
  Primer
ttgcggagtcgagtt

SEQ ID NO: 762 - DNA, 15 bp, Artificial Sequence
  Primer
tatcaacgggcgtct

SEQ ID NO: 763 - DNA, 15 bp, Artificial Sequence
  Primer
tggagatgcaacagg

SEQ ID NO: 764 - DNA, 15 bp, Artificial Sequence
  Primer
gttacactcctgtgg

SEQ ID NO: 765 - DNA, 15 bp, Artificial Sequence
  Primer
ccagtaggcacgctt

SEQ ID NO: 766 - DNA, 15 bp, Artificial Sequence
  Primer
ctagcacgaggaacc

SEQ ID NO: 767 - DNA, 15 bp, Artificial Sequence
  Primer
agttcacggagtgca

SEQ ID NO: 768 - DNA, 15 bp, Artificial Sequence
  Primer
ggttctggctcaatc

SEQ ID NO: 769 - DNA, 15 bp, Artificial Sequence
  Primer
atgaccaccggctcc

SEQ ID NO: 770 - DNA, 15 bp, Artificial Sequence
  Primer
tatgaccaccggctc

SEQ ID NO: 771 - DNA, 15 bp, Artificial Sequence
  Primer
gctcacgagtgagtt

SEQ ID NO: 772 - DNA, 15 bp, Artificial Sequence
  Primer
ctacgaccgtactga

SEQ ID NO: 773 - DNA, 15 bp, Artificial Sequence
  Primer
agcactagcacgagg

SEQ ID NO: 774 - DNA, 15 bp, Artificial Sequence
  Primer
gtgtgccgacgatag

SEQ ID NO: 775 - DNA, 15 bp, Artificial Sequence
  Primer
aggacaggcaaactg

SEQ ID NO: 776 - DNA, 15 bp, Artificial Sequence
  Primer
ttcctcatctggagg

SEQ ID NO: 777 - DNA, 15 bp, Artificial Sequence
  Primer
tataccgctacgacc

SEQ ID NO: 778 - DNA, 15 bp, Artificial Sequence
  Primer
atgccagtatggcct

SEQ ID NO: 779 - DNA, 15 bp, Artificial Sequence
  Primer
gtgtctggtgctcgt

SEQ ID NO: 780 - DNA, 15 bp, Artificial Sequence
  Primer
ccgaagccacgcact

SEQ ID NO: 781 - DNA, 15 bp, Artificial Sequence
  Primer
gcttttcctgggtag

SEQ ID NO: 782 - DNA, 15 bp, Artificial Sequence
  Primer
acactctgcatcgtc

SEQ ID NO: 783 - DNA, 15 bp, Artificial Sequence
  Primer
atcagagcgctcagt

SEQ ID NO: 784 - DNA, 15 bp, Artificial Sequence
  Primer
ttcacgtgcctccga

SEQ ID NO: 785 - DNA, 15 bp, Artificial Sequence
  Primer
tcagtgaaccaggca

SEQ ID NO: 786 - DNA, 15 bp, Artificial Sequence
  Primer
gcgccagcgatagtg

SEQ ID NO: 787 - DNA, 15 bp, Artificial Sequence
  Primer
gatagggcctcttcc

SEQ ID NO: 788 - DNA, 15 bp, Artificial Sequence
  Primer
ggatgtcctcacctg

SEQ ID NO: 789 - DNA, 15 bp, Artificial Sequence
  Primer
cacggacgaaaccgt

SEQ ID NO: 790 - DNA, 15 bp, Artificial Sequence
  Primer
tgcagccgagcgaca

SEQ ID NO: 791 - DNA, 15 bp, Artificial Sequence
  Primer
ctgccatgcttagtg

SEQ ID NO: 792 - DNA, 15 bp, Artificial Sequence
  Primer
ctgagttggacgtgt

SEQ ID NO: 793 - DNA, 15 bp, Artificial Sequence
  Primer
caggcttctgtacga

SEQ ID NO: 794 - DNA, 15 bp, Artificial Sequence
  Primer
acaggcaggacatgg

SEQ ID NO: 795 - DNA, 15 bp, Artificial Sequence
  Primer
aagaccctcctactg

SEQ ID NO: 796 - DNA, 15 bp, Artificial Sequence
  Primer
ccgctacgaccgtac

SEQ ID NO: 797 - DNA, 15 bp, Artificial Sequence
  Primer
gacccttgacgatgt

SEQ ID NO: 798 - DNA, 15 bp, Artificial Sequence
  Primer
gcactaggcatgcag

SEQ ID NO: 799 - DNA, 15 bp, Artificial Sequence
  Primer
tgtttggtggctcct

SEQ ID NO: 800 - DNA, 15 bp, Artificial Sequence
  Primer
gatcgaggttggttg

SEQ ID NO: 801 - DNA, 15 bp, Artificial Sequence
  Primer
aacttcggtaccgga

SEQ ID NO: 802 - DNA, 15 bp, Artificial Sequence
  Primer
agagatcgaggttgg

SEQ ID NO: 803 - DNA, 15 bp, Artificial Sequence
  Primer
ccgacgatagctcca

SEQ ID NO: 804 - DNA, 15 bp, Artificial Sequence
  Primer
actcctgtggagatg

SEQ ID NO: 805 - DNA, 15 bp, Artificial Sequence
  Primer
acggcagcagtagac

SEQ ID NO: 806 - DNA, 15 bp, Artificial Sequence
  Primer
ccacacagtggtgtt

SEQ ID NO: 807 - DNA, 15 bp, Artificial Sequence
  Primer
ttccagagggagacc

SEQ ID NO: 808 - DNA, 15 bp, Artificial Sequence
  Primer
cccttgcggagtcga

SEQ ID NO: 809 - DNA, 15 bp, Artificial Sequence
  Primer
acctgctacaccacc

SEQ ID NO: 810 - DNA, 15 bp, Artificial Sequence
  Primer
gataacaccagcagc

SEQ ID NO: 811 - DNA, 15 bp, Artificial Sequence
  Primer
acagctgctctttgc

SEQ ID NO: 812 - DNA, 15 bp, Artificial Sequence
  Primer
agacacctctcttcg

SEQ ID NO: 813 - DNA, 15 bp, Artificial Sequence
  Primer
tcttgacaggcagga

SEQ ID NO: 814 - DNA, 15 bp, Artificial Sequence
  Primer
ggtaggtacccacat

SEQ ID NO: 815 - DNA, 15 bp, Artificial Sequence
  Primer
tcacactctgcatcg

SEQ ID NO: 816 - DNA, 15 bp, Artificial Sequence
  Primer
gcagcagtagacacc

SEQ ID NO: 817 - DNA, 15 bp, Artificial Sequence
  Primer
gccgtccatttctgc

SEQ ID NO: 818 - DNA, 15 bp, Artificial Sequence
  Primer
tacctcccttgcgga

SEQ ID NO: 819 - DNA, 15 bp, Artificial Sequence
  Primer
ctcgtcacctaagtc

SEQ ID NO: 820 - DNA, 15 bp, Artificial Sequence
  Primer
gagtgcacctgctac

SEQ ID NO: 821 - DNA, 15 bp, Artificial Sequence
  Primer
cagctcaacgacctt

SEQ ID NO: 822 - DNA, 15 bp, Artificial Sequence
  Primer
cagagcgctcagtga

SEQ ID NO: 823 - DNA, 15 bp, Artificial Sequence
  Primer
gtgttcacgtgcctc

SEQ ID NO: 824 - DNA, 15 bp, Artificial Sequence
  Primer
gctcaacgaccttgt

SEQ ID NO: 825 - DNA, 15 bp, Artificial Sequence
  Primer
gagtccccgaagcca

SEQ ID NO: 826 - DNA, 15 bp, Artificial Sequence
  Primer
tgctacaccaccacc

SEQ ID NO: 827 - DNA, 15 bp, Artificial Sequence
  Primer
ccgtgattggtgctt

SEQ ID NO: 828 - DNA, 15 bp, Artificial Sequence
  Primer
ggagacaatgcgcag

SEQ ID NO: 829 - DNA, 15 bp, Artificial Sequence
  Primer
ccttgtggccgtgat

SEQ ID NO: 830 - DNA, 15 bp, Artificial Sequence
  Primer
gggtacacagagcgt

SEQ ID NO: 831 - DNA, 15 bp, Artificial Sequence
  Primer
gcacgaggaacccag

SEQ ID NO: 832 - DNA, 15 bp, Artificial Sequence
  Primer
cacgaggaacccagt

SEQ ID NO: 833 - DNA, 15 bp, Artificial Sequence
  Primer
agcacgtctctaacc

SEQ ID NO: 834 - DNA, 15 bp, Artificial Sequence
  Primer
cactctgcatcgtcc

SEQ ID NO: 835 - DNA, 15 bp, Artificial Sequence
  Primer
gcctgagccaatatc

SEQ ID NO: 836 - DNA, 15 bp, Artificial Sequence
  Primer
cggtaaagtcccttg

SEQ ID NO: 837 - DNA, 15 bp, Artificial Sequence
  Primer
acgaggaacccagta

SEQ ID NO: 838 - DNA, 15 bp, Artificial Sequence
  Primer
caacagtagtgccca

SEQ ID NO: 839 - DNA, 15 bp, Artificial Sequence
  Primer
ctcacgagtgagttc

SEQ ID NO: 840 - DNA, 15 bp, Artificial Sequence
  Primer
gggatcagtgccaag

SEQ ID NO: 841 - DNA, 15 bp, Artificial Sequence
  Primer
gatgtcctcacctgc

SEQ ID NO: 842 - DNA, 15 bp, Artificial Sequence
  Primer
gaacacatagggctg

SEQ ID NO: 843 - DNA, 15 bp, Artificial Sequence
  Primer
ctggatgtcctcacc

SEQ ID NO: 844 - DNA, 15 bp, Artificial Sequence
  Primer
ccgatagggcctctt

SEQ ID NO: 845 - DNA, 15 bp, Artificial Sequence
  Primer
cttccactctaggct

SEQ ID NO: 846 - DNA, 15 bp, Artificial Sequence
  Primer
gctgctccttgccac

SEQ ID NO: 847 - DNA, 15 bp, Artificial Sequence
  Primer
gagaatctcccaagc

SEQ ID NO: 848 - DNA, 15 bp, Artificial Sequence
  Primer
acaccaccaccatgt

SEQ ID NO: 849 - DNA, 15 bp, Artificial Sequence
  Primer
ggcctcttccacaga

SEQ ID NO: 850 - DNA, 15 bp, Artificial Sequence
  Primer
ggtgttcacgtgcct

SEQ ID NO: 851 - DNA, 15 bp, Artificial Sequence
  Primer
ctttgcgccagcgat

SEQ ID NO: 852 - DNA, 15 bp, Artificial Sequence
  Primer
ccattggttgccttg

SEQ ID NO: 853 - DNA, 15 bp, Artificial Sequence
  Primer
ggcttttcctgggta

SEQ ID NO: 854 - DNA, 15 bp, Artificial Sequence
  Primer
ggcgtcgacaagacg

SEQ ID NO: 855 - DNA, 15 bp, Artificial Sequence
  Primer
gccgagcgacagcta

SEQ ID NO: 856 - DNA, 15 bp, Artificial Sequence
  Primer
gttcggaaagagtgc

SEQ ID NO: 857 - DNA, 15 bp, Artificial Sequence
  Primer
acaaggctctccatc

SEQ ID NO: 858 - DNA, 15 bp, Artificial Sequence
  Primer
tccagagggagacct

SEQ ID NO: 859 - DNA, 15 bp, Artificial Sequence
  Primer
cccatgttggtaagg

SEQ ID NO: 860 - DNA, 15 bp, Artificial Sequence
  Primer
acagagtccccgaag

SEQ ID NO: 861 - DNA, 15 bp, Artificial Sequence
  Primer
cccatctgggccaca

SEQ ID NO: 862 - DNA, 15 bp, Artificial Sequence
  Primer
gtttcgcctcaatcc

SEQ ID NO: 863 - DNA, 15 bp, Artificial Sequence
  Primer
ccgtctgcacgcaca

SEQ ID NO: 864 - DNA, 15 bp, Artificial Sequence
  Primer
ctcttcgactcgatg

SEQ ID NO: 865 - DNA, 15 bp, Artificial Sequence
  Primer
tcatccagccagtct

SEQ ID NO: 866 - DNA, 15 bp, Artificial Sequence
  Primer
caagtgtgcgcgcaa

SEQ ID NO: 867 - DNA, 15 bp, Artificial Sequence
  Primer
cgggctttcccttgg

SEQ ID NO: 868 - DNA, 15 bp, Artificial Sequence
  Primer
cttttgcatggcacc

SEQ ID NO: 869 - DNA, 15 bp, Artificial Sequence
  Primer
gtgcctccttaacga

SEQ ID NO: 870 - DNA, 15 bp, Artificial Sequence
  Primer
ctggttctggctcaa

SEQ ID NO: 871 - DNA, 15 bp, Artificial Sequence
  Primer
cgagcgacagctaca

SEQ ID NO: 872 - DNA, 15 bp, Artificial Sequence
  Primer
tagggcctcttccac

SEQ ID NO: 873 - DNA, 15 bp, Artificial Sequence
  Primer
tcacggcagcagtag

SEQ ID NO: 874 - DNA, 15 bp, Artificial Sequence
  Primer
actctgcatcgtcct

SEQ ID NO: 875 - DNA, 15 bp, Artificial Sequence
  Primer
gtttggtggctcctc

SEQ ID NO: 876 - DNA, 15 bp, Artificial Sequence
  Primer
acggacgaaaccgta

SEQ ID NO: 877 - DNA, 15 bp, Artificial Sequence
  Primer
ccagagggagacctt

SEQ ID NO: 878 - DNA, 15 bp, Artificial Sequence
  Primer
ggttggcttttcctg

SEQ ID NO: 879 - DNA, 15 bp, Artificial Sequence
  Primer
attccagagggagac

SEQ ID NO: 880 - DNA, 15 bp, Artificial Sequence
  Primer
ggcagcagtagacac

SEQ ID NO: 881 - DNA, 15 bp, Artificial Sequence
  Primer
ggggcagtacgcctt

SEQ ID NO: 882 - DNA, 15 bp, Artificial Sequence
  Primer
cacgttcacgactca

SEQ ID NO: 883 - DNA, 15 bp, Artificial Sequence
  Primer
ctgtgagggaaaacc

SEQ ID NO: 884 - DNA, 15 bp, Artificial Sequence
  Primer
cgcaactttgcgcca

SEQ ID NO: 885 - DNA, 15 bp, Artificial Sequence
  Primer
cgactgcaacacgga

SEQ ID NO: 886 - DNA, 15 bp, Artificial Sequence
  Primer
gcgtcgacaagacgt

SEQ ID NO: 887 - DNA, 15 bp, Artificial Sequence
  Primer
ctatgaccaccggct

SEQ ID NO: 888 - DNA, 15 bp, Artificial Sequence
  Primer
acaagaccctcctac

SEQ ID NO: 889 - DNA, 15 bp, Artificial Sequence
  Primer
tgctccttgccacgt

SEQ ID NO: 890 - DNA, 15 bp, Artificial Sequence
  Primer
tggatgtcctcacct

SEQ ID NO: 891 - DNA, 15 bp, Artificial Sequence
  Primer
ttcaagctggggcag

SEQ ID NO: 892 - DNA, 15 bp, Artificial Sequence
  Primer
cctctcttcgactcg

SEQ ID NO: 893 - DNA, 15 bp, Artificial Sequence
  Primer
tcaagctggggcagt

SEQ ID NO: 894 - DNA, 15 bp, Artificial Sequence
  Primer
cagaaagtcgcacgt

SEQ ID NO: 895 - DNA, 15 bp, Artificial Sequence
  Primer
cttcctcacactctg

SEQ ID NO: 896 - DNA, 15 bp, Artificial Sequence
  Primer
tggcttttcctgggt

SEQ ID NO: 897 - DNA, 15 bp, Artificial Sequence
  Primer
ggtgagcaggtctga

SEQ ID NO: 898 - DNA, 15 bp, Artificial Sequence
  Primer
gtgagcaggtctgaa

SEQ ID NO: 899 - DNA, 15 bp, Artificial Sequence
  Primer
ccactctaggcttca

SEQ ID NO: 900 - DNA, 15 bp, Artificial Sequence
  Primer
tgagcaggtctgaag

SEQ ID NO: 901 - DNA, 15 bp, Artificial Sequence
  Primer
gtgactgcacctcca

SEQ ID NO: 902 - DNA, 15 bp, Artificial Sequence
  Primer
agcacgaggaaccca

SEQ ID NO: 903 - DNA, 15 bp, Artificial Sequence
  Primer
gcctccttaacgatg

SEQ ID NO: 904 - DNA, 15 bp, Artificial Sequence
  Primer
gagacaatgcgcagt

SEQ ID NO: 905 - DNA, 15 bp, Artificial Sequence
  Primer
gctccttgccacgta

SEQ ID NO: 906 - DNA, 15 bp, Artificial Sequence
  Primer
aacccagtaggcacg

SEQ ID NO: 907 - DNA, 15 bp, Artificial Sequence
  Primer
cgtatacgccccatg

SEQ ID NO: 908 - DNA, 15 bp, Artificial Sequence
  Primer
gtccaatctctgggt

SEQ ID NO: 909 - DNA, 15 bp, Artificial Sequence
  Primer
gtcttgacaggcagg

SEQ ID NO: 910 - DNA, 15 bp, Artificial Sequence
  Primer
cctcccttgcggagt

SEQ ID NO: 911 - DNA, 15 bp, Artificial Sequence
  Primer
tgccgtccatttctg

SEQ ID NO: 912 - DNA, 15 bp, Artificial Sequence
  Primer
tcgagttcaccgttc

SEQ ID NO: 913 - DNA, 15 bp, Artificial Sequence
  Primer
cttgcggagtcgagt

SEQ ID NO: 914 - DNA, 15 bp, Artificial Sequence
  Primer
gtatacgccccatga

SEQ ID NO: 915 - DNA, 15 bp, Artificial Sequence
  Primer
aacagcctctgctac

SEQ ID NO: 916 - DNA, 15 bp, Artificial Sequence
  Primer
ctgtggagatgcaac

SEQ ID NO: 917 - DNA, 15 bp, Artificial Sequence
  Primer
gagtactcccagtgt

SEQ ID NO: 918 - DNA, 15 bp, Artificial Sequence
  Primer
gtgtacgaaccgtct

SEQ ID NO: 919 - DNA, 15 bp, Artificial Sequence
  Primer
actagcacgaggaac

SEQ ID NO: 920 - DNA, 15 bp, Artificial Sequence
  Primer
ttggggtttcgccca

SEQ ID NO: 921 - DNA, 15 bp, Artificial Sequence
  Primer
ggcaggacatggcat

SEQ ID NO: 922 - DNA, 15 bp, Artificial Sequence
  Primer
tgtgcctccttaacg

SEQ ID NO: 923 - DNA, 15 bp, Artificial Sequence
  Primer
ccggacgaaacctag

SEQ ID NO: 924 - DNA, 15 bp, Artificial Sequence
  Primer
ctgcaacacggacga

SEQ ID NO: 925 - DNA, 15 bp, Artificial Sequence
  Primer
catgcagccgagcga

SEQ ID NO: 926 - DNA, 15 bp, Artificial Sequence
  Primer
agctcacgagtgagt

SEQ ID NO: 927 - DNA, 15 bp, Artificial Sequence
  Primer
catccagccagtctt

SEQ ID NO: 928 - DNA, 15 bp, Artificial Sequence
  Primer
ggggtttcgcccaca

SEQ ID NO: 929 - DNA, 15 bp, Artificial Sequence
  Primer
gtggtttgctgcatc

SEQ ID NO: 930 - DNA, 15 bp, Artificial Sequence
  Primer
gctctactagaccac

SEQ ID NO: 931 - DNA, 15 bp, Artificial Sequence
  Primer
agggcctcttccaca

SEQ ID NO: 932 - DNA, 15 bp, Artificial Sequence
  Primer
gagggccatttagct

SEQ ID NO: 933 - DNA, 15 bp, Artificial Sequence
  Primer
cagctctactagacc

SEQ ID NO: 934 - DNA, 15 bp, Artificial Sequence
  Primer
gtagctacactccac

SEQ ID NO: 935 - DNA, 15 bp, Artificial Sequence
  Primer
caccattggttgcct

SEQ ID NO: 936 - DNA, 15 bp, Artificial Sequence
  Primer
gacagctgctctttg

SEQ ID NO: 937 - DNA, 15 bp, Artificial Sequence
  Primer
gtgagttcacggagt

SEQ ID NO: 938 - DNA, 15 bp, Artificial Sequence
  Primer
gagtgagttcacgga

SEQ ID NO: 939 - DNA, 15 bp, Artificial Sequence
  Primer
aagagcatgaggcca

SEQ ID NO: 940 - DNA, 15 bp, Artificial Sequence
  Primer
cagtagacacctctc

SEQ ID NO: 941 - DNA, 15 bp, Artificial Sequence
  Primer
cttcgagttcaccgt

SEQ ID NO: 942 - DNA, 15 bp, Artificial Sequence
  Primer
gtcgacatagcgagt

SEQ ID NO: 943 - DNA, 15 bp, Artificial Sequence
  Primer
gacaggcttctgtac

SEQ ID NO: 944 - DNA, 15 bp, Artificial Sequence
  Primer
gagatgcaacagggt

SEQ ID NO: 945 - DNA, 15 bp, Artificial Sequence
  Primer
tcacgtgcctccgat

SEQ ID NO: 946 - DNA, 15 bp, Artificial Sequence
  Primer
catcctctgtaccgt

SEQ ID NO: 947 - DNA, 15 bp, Artificial Sequence
  Primer
gacggtaaagtccct

SEQ ID NO: 948 - DNA, 15 bp, Artificial Sequence
  Primer
agagggacgagttac

SEQ ID NO: 949 - DNA, 15 bp, Artificial Sequence
  Primer
tccaatctctgggtc

SEQ ID NO: 950 - DNA, 15 bp, Artificial Sequence
  Primer
ctgaatgccgtccat

SEQ ID NO: 951 - DNA, 15 bp, Artificial Sequence
  Primer
gagtgcttcgagttc

SEQ ID NO: 952 - DNA, 15 bp, Artificial Sequence
  Primer
acgagtactcccagt

SEQ ID NO: 953 - DNA, 15 bp, Artificial Sequence
  Primer
acctctcttcgactc

SEQ ID NO: 954 - DNA, 15 bp, Artificial Sequence
  Primer
catgtggcacgagta

SEQ ID NO: 955 - DNA, 15 bp, Artificial Sequence
  Primer
caagctcgtcaccta

SEQ ID NO: 956 - DNA, 15 bp, Artificial Sequence
  Primer
tgcagctgctccttg

SEQ ID NO: 957 - DNA, 15 bp, Artificial Sequence
  Primer
cactttgtgcctcct

SEQ ID NO: 958 - DNA, 15 bp, Artificial Sequence
  Primer
tttgggcattcccct

SEQ ID NO: 959 - DNA, 15 bp, Artificial Sequence
  Primer
ctctgtaccgtactc

SEQ ID NO: 960 - DNA, 15 bp, Artificial Sequence
  Primer
cagctgaggcaccaa

SEQ ID NO: 961 - DNA, 15 bp, Artificial Sequence
  Primer
gcagcctgtgaggga

SEQ ID NO: 962 - DNA, 15 bp, Artificial Sequence
  Primer
gttgcagctgctcct

SEQ ID NO: 963 - DNA, 15 bp, Artificial Sequence
  Primer
gcactagcacgagga

SEQ ID NO: 964 - DNA, 15 bp, Artificial Sequence
  Primer
gttctggttctggct

SEQ ID NO: 965 - DNA, 15 bp, Artificial Sequence
  Primer
ttacgggctttccct

SEQ ID NO: 966 - DNA, 15 bp, Artificial Sequence
  Primer
gggctttcccttggt

SEQ ID NO: 967 - DNA, 15 bp, Artificial Sequence
  Primer
cttcctcatctggag

SEQ ID NO: 968 - DNA, 15 bp, Artificial Sequence
  Primer
ccagtaaaccaggag

SEQ ID NO: 969 - DNA, 15 bp, Artificial Sequence
  Primer
accaccggctccctt

SEQ ID NO: 970 - DNA, 15 bp, Artificial Sequence
  Primer
gtgcaccactgccat

SEQ ID NO: 971 - DNA, 15 bp, Artificial Sequence
  Primer
gacaggcaggacatg

SEQ ID NO: 972 - DNA, 15 bp, Artificial Sequence
  Primer
cgaggaacccagtag

SEQ ID NO: 973 - DNA, 15 bp, Artificial Sequence
  Primer
tgactgcacctccat

SEQ ID NO: 974 - DNA, 15 bp, Artificial Sequence
  Primer
ctcctcagaggtaag

SEQ ID NO: 975 - DNA, 15 bp, Artificial Sequence
  Primer
accactgccatgctt

SEQ ID NO: 976 - DNA, 15 bp, Artificial Sequence
  Primer
ttctggttctggctc

SEQ ID NO: 977 - DNA, 15 bp, Artificial Sequence
  Primer
gttggcttttcctgg

SEQ ID NO: 978 - DNA, 15 bp, Artificial Sequence
  Primer
cagccaacataggca

SEQ ID NO: 979 - DNA, 15 bp, Artificial Sequence
  Primer
gggcattcccctttg

SEQ ID NO: 980 - DNA, 15 bp, Artificial Sequence
  Primer
gtgtagacagagcac

SEQ ID NO: 981 - DNA, 15 bp, Artificial Sequence
  Primer
actgtaagagggcca

SEQ ID NO: 982 - DNA, 15 bp, Artificial Sequence
  Primer
gatggcaacctcttc

SEQ ID NO: 983 - DNA, 15 bp, Artificial Sequence
  Primer
ctcacactctgcatc

SEQ ID NO: 984 - DNA, 15 bp, Artificial Sequence
  Primer
atggcgtcgacaaga

SEQ ID NO: 985 - DNA, 15 bp, Artificial Sequence
  Primer
gccttaagaggcatg

SEQ ID NO: 986 - DNA, 15 bp, Artificial Sequence
  Primer
ggtacacagagcgta

SEQ ID NO: 987 - DNA, 15 bp, Artificial Sequence
  Primer
agccagtaaaccagg

SEQ ID NO: 988 - DNA, 15 bp, Artificial Sequence
  Primer
cactagcacgaggaa

SEQ ID NO: 989 - DNA, 15 bp, Artificial Sequence
  Primer
ggacaggcaaactga

SEQ ID NO: 990 - DNA, 15 bp, Artificial Sequence
  Primer
cagtgaaccaggcaa

SEQ ID NO: 991 - DNA, 15 bp, Artificial Sequence
  Primer
cgacatagcgagtga

SEQ ID NO: 992 - DNA, 15 bp, Artificial Sequence
  Primer
gagggaaaaccacac

SEQ ID NO: 993 - DNA, 15 bp, Artificial Sequence
  Primer
gccagtaaaccagga

SEQ ID NO: 994 - DNA, 15 bp, Artificial Sequence
  Primer
ttgggcattcccctt

SEQ ID NO: 995 - DNA, 15 bp, Artificial Sequence
  Primer
gagggacgagttact

SEQ ID NO: 996 - DNA, 15 bp, Artificial Sequence
  Primer
cggcagcagtagaca

SEQ ID NO: 997 - DNA, 15 bp, Artificial Sequence
  Primer
caagaccctcctact

SEQ ID NO: 998 - DNA, 15 bp, Artificial Sequence
  Primer
cacctctcttcgact

SEQ ID NO: 999 - DNA, 15 bp, Artificial Sequence
  Primer
tacgggctttccctt

SEQ ID NO: 1000 - DNA, 15 bp, Artificial Sequence
  Primer
ttgcagctgctcctt

SEQ ID NO: 1001 - DNA, 15 bp, Artificial Sequence
  Primer
acgggctttcccttg

SEQ ID NO: 1002 - DNA, 15 bp, Artificial Sequence
  Primer
cctcacactctgcat

SEQ ID NO: 1003 - DNA, 15 bp, Artificial Sequence
  Primer
gaagagggacgagtt

SEQ ID NO: 1004 - DNA, 15 bp, Artificial Sequence
  Primer
gtgcttccactctag

SEQ ID NO: 1005 - DNA, 15 bp, Artificial Sequence
  Primer
caccttttacgggct

SEQ ID NO: 1006 - DNA, 15 bp, Artificial Sequence
  Primer
gcacgtctctaacct

SEQ ID NO: 1007 - DNA, 15 bp, Artificial Sequence
  Primer
caccaccaccatgtt

SEQ ID NO: 1008 - DNA, 15 bp, Artificial Sequence
  Primer
ctgtaagagggccat

SEQ ID NO: 1009 - DNA, 15 bp, Artificial Sequence
  Primer
cgcctcaatccattc

SEQ ID NO: 1010 - DNA, 15 bp, Artificial Sequence
  Primer
gcgtatacgccccat

SEQ ID NO: 1011 - DNA, 15 bp, Artificial Sequence
  Primer
attggtgcaccccct

SEQ ID NO: 1012 - DNA, 15 bp, Artificial Sequence
  Primer
agaccctcctactgt

SEQ ID NO: 1013 - DNA, 15 bp, Artificial Sequence
  Primer
ggacgaaaccgtaag

SEQ ID NO: 1014 - DNA, 15 bp, Artificial Sequence
  Primer
cagtgtagacagagc

SEQ ID NO: 1015 - DNA, 15 bp, Artificial Sequence
  Primer
cgcctttttccagct

SEQ ID NO: 1016 - DNA, 15 bp, Artificial Sequence
  Primer
ctggagggtaaaagg

SEQ ID NO: 1017 - DNA, 15 bp, Artificial Sequence
  Primer
ccaccaccatgtttc

SEQ ID NO: 1018 - DNA, 15 bp, Artificial Sequence
  Primer
cctgtgagggaaaac

SEQ ID NO: 1019 - DNA, 15 bp, Artificial Sequence
  Primer
caagctggggcagta

SEQ ID NO: 1020 - DNA, 15 bp, Artificial Sequence
  Primer
tccactctaggcttc

SEQ ID NO: 1021 - DNA, 21 bp, Artificial Sequence
  Primer
ggcattactatcagaccacca

SEQ ID NO: 1022 - DNA, 21 bp, Artificial Sequence
  Primer
aggacaagagggcaaaagtaa

SEQ ID NO: 1023 - DNA, 19 bp, Artificial Sequence
  Primer
actacagcagccaaactca

SEQ ID NO: 1024 - DNA, 21 bp, Artificial Sequence
  Primer
aggacaagagggcaaaagtaa

SEQ ID NO: 1025 - DNA, 19 bp, Artificial Sequence
  Primer
actacagcagccaaactca

SEQ ID NO: 1026 - DNA, 21 bp, Artificial Sequence
  Primer
ggcattactatcagaccacca

SEQ ID NO: 1027 - DNA, 22 bp, Artificial Sequence
  Primer
gctacaaacaatgtctttcgct

SEQ ID NO: 1028 - DNA, 20 bp, Artificial Sequence
  Primer
ccagaacaaacccaaggaaa

SEQ ID NO: 1029 - DNA, 19 bp, Artificial Sequence
  Primer
aaagagaagccccagcaca

SEQ ID NO: 1030 - DNA, 18 bp, Artificial Sequence
  Primer
aaaagagaagccccagca

SEQ ID NO: 1031 - DNA, 19 bp, Artificial Sequence
  Primer
ccaaccaccacagacatca

SEQ ID NO: 1032 - DNA, 20 bp, Artificial Sequence
  Primer
accaccacagacatcaatca

SEQ ID NO: 1033 - DNA, 20 bp, Artificial Sequence
  Primer
ccaaccaccacagacatcaa

SEQ ID NO: 1034 - DNA, 19 bp, Artificial Sequence
  Primer
ctaccaaccaccacagaca

SEQ ID NO: 1035 - DNA, 18 bp, Artificial Sequence
  Primer
acaagaggagccaccaaa

SEQ ID NO: 1036 - DNA, 18 bp, Artificial Sequence
  Primer
aacaagaggagccaccaa

SEQ ID NO: 1037 - DNA, 19 bp, Artificial Sequence
  Primer
ggagccaccaaacacagaa

SEQ ID NO: 1038 - DNA, 18 bp, Artificial Sequence
  Primer
aaacaagaggagccacca

SEQ ID NO: 1039 - DNA, 19 bp, Artificial Sequence
  Primer
aaagagaagccccagcaca

SEQ ID NO: 1040 - DNA, 19 bp, Artificial Sequence
  Primer
gcagacttcaaagccttca

SEQ ID NO: 1041 - DNA, 21 bp, Artificial Sequence
  Primer
accaaccaccacagacatcaa

SEQ ID NO: 1042 - DNA, 22 bp, Artificial Sequence
  Primer
gctacaaacaatgtctttcgct

SEQ ID NO: 1043 - DNA, 19 bp, Artificial Sequence
  Primer
agaggagccaccaaacaca

SEQ ID NO: 1044 - DNA, 20 bp, Artificial Sequence
  Primer
accaccacagacatcaatca

SEQ ID NO: 1045 - DNA, 19 bp, Artificial Sequence
  Primer
agaggagccaccaaacaca

SEQ ID NO: 1046 - DNA, 25 bp, Artificial Sequence
  Primer
caccaaaactcaaagaagactacca

SEQ ID NO: 1047 - DNA, 19 bp, Artificial Sequence
  Primer
ctaccaaccaccacagaca

SEQ ID NO: 1048 - DNA, 19 bp, Artificial Sequence
  Primer
ctaccaaccaccacagaca

SEQ ID NO: 1049 - DNA, 18 bp, Artificial Sequence
  Primer
acaagaggagccaccaaa

SEQ ID NO: 1050 - DNA, 19 bp, Artificial Sequence
  Primer
ggagccaccaaacacagaa

SEQ ID NO: 1051 - DNA, 20 bp, Artificial Sequence
  Primer
accaccacagacatcaatca

SEQ ID NO: 1052 - DNA, 19 bp, Artificial Sequence
  Primer
ccaaccaccacagacatca

SEQ ID NO: 1053 - DNA, 19 bp, Artificial Sequence
  Primer
ccaaccaccacagacatca

SEQ ID NO: 1054 - DNA, 20 bp, Artificial Sequence
  Primer
accaaccaccacagacatca

SEQ ID NO: 1055 - DNA, 22 bp, Artificial Sequence
  Primer
caaccaccacagacatcaatca

SEQ ID NO: 1056 - DNA, 18 bp, Artificial Sequence
  Primer
aagaggagccaccaaaca

SEQ ID NO: 1057 - DNA, 18 bp, Artificial Sequence
  Primer
aagaggagccaccaaaca

SEQ ID NO: 1058 - DNA, 20 bp, Artificial Sequence
  Primer
ccaaccaccacagacatcaa

SEQ ID NO: 1059 - DNA, 20 bp, Artificial Sequence
  Primer
ccaaccaccacagacatcaa

SEQ ID NO: 1060 - DNA, 18 bp, Artificial Sequence
  Primer
aacaagaggagccaccaa

SEQ ID NO: 1061 - DNA, 18 bp, Artificial Sequence
  Primer
aaaagagaagccccagca

SEQ ID NO: 1062 - DNA, 18 bp, Artificial Sequence
  Primer
aaacaagaggagccacca

SEQ ID NO: 1063 - DNA, 25 bp, Artificial Sequence
  Primer
caccaaaactcaaagaagactacca

SEQ ID NO: 1064 - DNA, 25 bp, Artificial Sequence
  Primer
caccaaaactcaaagaagactacca

SEQ ID NO: 1065 - DNA, 25 bp, Artificial Sequence
  Primer
caccaaaactcaaagaagactacca

SEQ ID NO: 1066 - DNA, 19 bp, Artificial Sequence
  Primer
tgcaactactcatgcctct

SEQ ID NO: 1067 - DNA, 19 bp, Artificial Sequence
  Primer
gctgcaactactcatgcct

SEQ ID NO: 1068 - DNA, 19 bp, Artificial Sequence
  Primer
tgcaactactcatgcctct

SEQ ID NO: 1069 - DNA, 18 bp, Artificial Sequence
  Primer
aaaagagaagccccagca

SEQ ID NO: 1070 - DNA, 19 bp, Artificial Sequence
  Primer
gctgcaactactcatgcct

SEQ ID NO: 1071 - DNA, 22 bp, Artificial Sequence
  Primer
catacaaaacattcccaccaac

SEQ ID NO: 1072 - DNA, 20 bp, Artificial Sequence
  Primer
caagtcacataagcctccca

SEQ ID NO: 1073 - DNA, 20 bp, Artificial Sequence
  Primer
attgttgctgctgctacttt

SEQ ID NO: 1074 - DNA, 20 bp, Artificial Sequence
  Primer
gtgctttccttctgtgcttt

SEQ ID NO: 1075 - DNA, 18 bp, Artificial Sequence
  Primer
tatgccgcttatgccact

SEQ ID NO: 1076 - DNA, 21 bp, Artificial Sequence
  Primer
gtgctttccttctgtgctttt

SEQ ID NO: 1077 - DNA, 20 bp, Artificial Sequence
  Primer
ctcattcgcaaatccaacca

SEQ ID NO: 1078 - DNA, 19 bp, Artificial Sequence
  Primer
gaggacaagagggcaaaag

SEQ ID NO: 1079 - DNA, 20 bp, Artificial Sequence
  Primer
actacaaaagagaagcccca

SEQ ID NO: 1080 - DNA, 19 bp, Artificial Sequence
  Primer
gaggacaagagggcaaaag

SEQ ID NO: 1081 - DNA, 19 bp, Artificial Sequence
  Primer
gtgctttccttctgtgctt

SEQ ID NO: 1082 - DNA, 20 bp, Artificial Sequence
  Primer
tgtgctttccttctgtgctt

SEQ ID NO: 1083 - DNA, 20 bp, Artificial Sequence
  Primer
tgctttccttctgtgctttt

SEQ ID NO: 1084 - DNA, 21 bp, Artificial Sequence
  Primer
ctattgttgctgctgctactt

SEQ ID NO: 1085 - DNA, 18 bp, Artificial Sequence
  Primer
gtggtgacggcaaaatga

SEQ ID NO: 1086 - DNA, 19 bp, Artificial Sequence
  Primer
ccaaccaccacagacatca

SEQ ID NO: 1087 - DNA, 19 bp, Artificial Sequence
  Primer
tgaaaacatgacgcccaga

SEQ ID NO: 1088 - DNA, 20 bp, Artificial Sequence
  Primer
ccaaccaccacagacatcaa

SEQ ID NO: 1089 - DNA, 21 bp, Artificial Sequence
  Primer
aggacaagagggcaaaagtaa

SEQ ID NO: 1090 - DNA, 20 bp, Artificial Sequence
  Primer
ccaaccaccacagacatcaa

SEQ ID NO: 1091 - DNA, 20 bp, Artificial Sequence
  Primer
accaccacagacatcaatca

SEQ ID NO: 1092 - DNA, 21 bp, Artificial Sequence
  Primer
ggcattactatcagaccacca

SEQ ID NO: 1093 - DNA, 20 bp, Artificial Sequence
  Primer
accaccacagacatcaatca

SEQ ID NO: 1094 - DNA, 20 bp, Artificial Sequence
  Primer
acccaacactcaacatctca

SEQ ID NO: 1095 - DNA, 19 bp, Artificial Sequence
  Primer
tgtgctttccttctgtgct

SEQ ID NO: 1096 - DNA, 22 bp, Artificial Sequence
  Primer
gctacaaacaatgtctttcgct

SEQ ID NO: 1097 - DNA, 19 bp, Artificial Sequence
  Primer
aaaagagaagccccagcac

SEQ ID NO: 1098 - DNA, 19 bp, Artificial Sequence
  Primer
tgtgctttccttctgtgct

SEQ ID NO: 1099 - DNA, 19 bp, Artificial Sequence
  Primer
ccaaccaccacagacatca

SEQ ID NO: 1100 - DNA, 20 bp, Artificial Sequence
  Primer
gtgctttccttctgtgcttt

SEQ ID NO: 1101 - DNA, 19 bp, Artificial Sequence
  Primer
ggagaggaacttcaccaca

SEQ ID NO: 1102 - DNA, 19 bp, Artificial Sequence
  Primer
caggagaggaacttcacca

SEQ ID NO: 1103 - DNA, 19 bp, Artificial Sequence
  Primer
tcccaggagaggaacttca

SEQ ID NO: 1104 - DNA, 19 bp, Artificial Sequence
  Primer
gtggtgacggcaaaatgaa

SEQ ID NO: 1105 - DNA, 19 bp, Artificial Sequence
  Primer
tggtgacggcaaaatgaaa

SEQ ID NO: 1106 - DNA, 20 bp, Artificial Sequence
  Primer
ggtgacggcaaaatgaaaga

SEQ ID NO: 1107 - DNA, 21 bp, Artificial Sequence
  Primer
acaactcctggaacaatggaa

SEQ ID NO: 1108 - DNA, 21 bp, Artificial Sequence
  Primer
acaactcctggaacaatggaa

SEQ ID NO: 1109 - DNA, 21 bp, Artificial Sequence
  Primer
acaactcctggaacaatggaa

SEQ ID NO: 1110 - DNA, 21 bp, Artificial Sequence
  Primer
acaactcctggaacaatggaa

SEQ ID NO: 1111 - DNA, 22 bp, Artificial Sequence
  Primer
atgatgagccgacgacgactac

SEQ ID NO: 1112 - DNA, 19 bp, Artificial Sequence
  Primer
tatgatgagccgacgacga

SEQ ID NO: 1113 - DNA, 19 bp, Artificial Sequence
  Primer
tatgatgagccgacgacga

SEQ ID NO: 1114 - DNA, 19 bp, Artificial Sequence
  Primer
tatgatgagccgacgacga

SEQ ID NO: 1115 - DNA, 21 bp, Artificial Sequence
  Primer
gctacacaccttccaaactca

SEQ ID NO: 1116 - DNA, 21 bp, Artificial Sequence
  Primer
cttctaaccctaagacaccca

SEQ ID NO: 1117 - DNA, 18 bp, Artificial Sequence
  Primer
gctattgttgctgctgct

SEQ ID NO: 1118 - DNA, 20 bp, Artificial Sequence
  Primer
ctattgttgctgctgctact

SEQ ID NO: 1119 - DNA, 20 bp, Artificial Sequence
  Primer
gaaaacatgacgcccagaga

SEQ ID NO: 1120 - DNA, 19 bp, Artificial Sequence
  Primer
ggaggacaaccaatcacca

SEQ ID NO: 1121 - DNA, 19 bp, Artificial Sequence
  Primer
aaagagaagccccagcaca

SEQ ID NO: 1122 - DNA, 22 bp, Artificial Sequence
  Primer
ggctaagcgtaacattaaacca

SEQ ID NO: 1123 - DNA, 21 bp, Artificial Sequence
  Primer
gcaagtcacataagcctccca

SEQ ID NO: 1124 - DNA, 19 bp, Artificial Sequence
  Primer
acccaggaaaagccaacca

SEQ ID NO: 1125 - DNA, 19 bp, Artificial Sequence
  Primer
cccaggaaaagccaaccaa

SEQ ID NO: 1126 - DNA, 20 bp, Artificial Sequence
  Primer
ggaggacaaccaatcaccaa

SEQ ID NO: 1127 - DNA, 18 bp, Artificial Sequence
  Primer
aaaagagaagccccagca

SEQ ID NO: 1128 - DNA, 21 bp, Artificial Sequence
  Primer
ctcacttcgtcatcaaagaca

SEQ ID NO: 1129 - DNA, 19 bp, Artificial Sequence
  Primer
ggaggacaaccaatcacca

SEQ ID NO: 1130 - DNA, 20 bp, Artificial Sequence
  Primer
ggaggacaaccaatcaccaa

SEQ ID NO: 1131 - DNA, 19 bp, Artificial Sequence
  Primer
acccaggaaaagccaacca

SEQ ID NO: 1132 - DNA, 21 bp, Artificial Sequence
  Primer
atcaggaacatacgagggcaa

SEQ ID NO: 1133 - DNA, 19 bp, Artificial Sequence
  Primer
gcagacttcaaagccttca

SEQ ID NO: 1134 - DNA, 20 bp, Artificial Sequence
  Primer
ggtcattcaacccagaaaca

SEQ ID NO: 1135 - DNA, 22 bp, Artificial Sequence
  Primer
ccaaaaacaaatcgccaaccaa

SEQ ID NO: 1136 - DNA, 20 bp, Artificial Sequence
  Primer
ggtcattcaacccagaaaca

SEQ ID NO: 1137 - DNA, 24 bp, Artificial Sequence
  Primer
ggtcattcaacccagaaacaaaca

SEQ ID NO: 1138 - DNA, 20 bp, Artificial Sequence
  Primer
atcaggaacatacgagggca

SEQ ID NO: 1139 - DNA, 20 bp, Artificial Sequence
  Primer
atcaggaacatacgagggca

SEQ ID NO: 1140 - DNA, 20 bp, Artificial Sequence
  Primer
atcaggaacatacgagggca

SEQ ID NO: 1141 - DNA, 19 bp, Artificial Sequence
  Primer
caggaacatacgagggcaa

SEQ ID NO: 1142 - DNA, 19 bp, Artificial Sequence
  Primer
caggaacatacgagggcaa

SEQ ID NO: 1143 - DNA, 19 bp, Artificial Sequence
  Primer
gctgcaactactcatgcct

SEQ ID NO: 1144 - DNA, 21 bp, Artificial Sequence
  Primer
gctacacaccttccaaactca

SEQ ID NO: 1145 - DNA, 20 bp, Artificial Sequence
  Primer
ccaccacagacatcaatcac

SEQ ID NO: 1146 - DNA, 19 bp, Artificial Sequence
  Primer
tgcaactactcatgcctct

SEQ ID NO: 1147 - DNA, 21 bp, Artificial Sequence
  Primer
atcaggaacatacgagggcaa

SEQ ID NO: 1148 - DNA, 18 bp, Artificial Sequence
  Primer
ttcaaagggaccagcaca

SEQ ID NO: 1149 - DNA, 20 bp, Artificial Sequence
  Primer
gttctctaccaaccaccaca

SEQ ID NO: 1150 - DNA, 19 bp, Artificial Sequence
  Primer
ctgccaattcaactgtgct

SEQ ID NO: 1151 - DNA, 24 bp, Artificial Sequence
  Primer
ccaattcaactgtgctttccttct

SEQ ID NO: 1152 - DNA, 22 bp, Artificial Sequence
  Primer
ccacattgaccatccaaatcct

SEQ ID NO: 1153 - DNA, 20 bp, Artificial Sequence
  Primer
gcatctaaaaagcctcgcca

SEQ ID NO: 1154 - DNA, 22 bp, Artificial Sequence
  Primer
gcagacttcaaagccttcaaac

SEQ ID NO: 1155 - DNA, 21 bp, Artificial Sequence
  Primer
agacttcaaagccttcaaacc

SEQ ID NO: 1156 - DNA, 21 bp, Artificial Sequence
  Primer
gctacacaccttccaaactca

SEQ ID NO: 1157 - DNA, 21 bp, Artificial Sequence
  Primer
gcagattatcacaaccactca

SEQ ID NO: 1158 - DNA, 24 bp, Artificial Sequence
  Primer
caccaaaactcaaagaagactacc

SEQ ID NO: 1159 - DNA, 25 bp, Artificial Sequence
  Primer
acaccaaaactcaaagaagactacc

SEQ ID NO: 1160 - DNA, 25 bp, Artificial Sequence
  Primer
acaccaaaactcaaagaagactacc

SEQ ID NO: 1161 - DNA, 22 bp, Artificial Sequence
  Primer
gctacaaacaatgtctttcgct

SEQ ID NO: 1162 - DNA, 21 bp, Artificial Sequence
  Primer
ggcattactatcagaccacca

SEQ ID NO: 1163 - DNA, 20 bp, Artificial Sequence
  Primer
acccaacactcaacatctca

SEQ ID NO: 1164 - DNA, 19 bp, Artificial Sequence
  Primer
tgaggacaagagggcaaaa

SEQ ID NO: 1165 - DNA, 19 bp, Artificial Sequence
  Primer
tatgatgagccgacgacga

SEQ ID NO: 1166 - DNA, 19 bp, Artificial Sequence
  Primer
tatgatgagccgacgacga

SEQ ID NO: 1167 - DNA, 19 bp, Artificial Sequence
  Primer
tatgatgagccgacgacga

SEQ ID NO: 1168 - DNA, 19 bp, Artificial Sequence
  Primer
tatgatgagccgacgacga

SEQ ID NO: 1169 - DNA, 19 bp, Artificial Sequence
  Primer
tatgatgagccgacgacga

SEQ ID NO: 1170 - DNA, 19 bp, Artificial Sequence
  Primer
tatgatgagccgacgacga

SEQ ID NO: 1171 - DNA, 19 bp, Artificial Sequence
  Primer
tatgatgagccgacgacga

SEQ ID NO: 1172 - DNA, 20 bp, Artificial Sequence
  Primer
ccaccacagacatcaatcac

SEQ ID NO: 1173 - DNA, 19 bp, Artificial Sequence
  Primer
ctaccaaccaccacagaca

SEQ ID NO: 1174 - DNA, 19 bp, Artificial Sequence
  Primer
tccgctctcccattttgtc

SEQ ID NO: 1175 - DNA, 22 bp, Artificial Sequence
  Primer
tcaagattggacctgaaagaac

SEQ ID NO: 1176 - DNA, 19 bp, Artificial Sequence
  Primer
aaagagaagccccagcaca

SEQ ID NO: 1177 - DNA, 22 bp, Artificial Sequence
  Primer
ggctaagcgtaacattaaacca

SEQ ID NO: 1178 - DNA, 21 bp, Artificial Sequence
  Primer
ggatacctcacttcgtcatca

SEQ ID NO: 1179 - DNA, 20 bp, Artificial Sequence
  Primer
gactacaaaagagaagcccc

SEQ ID NO: 1180 - DNA, 21 bp, Artificial Sequence
  Primer
ccaattcaactgtgctttcct

SEQ ID NO: 1181 - DNA, 22 bp, Artificial Sequence
  Primer
aaccaccacagacatcaatcac

SEQ ID NO: 1182 - DNA, 20 bp, Artificial Sequence
  Primer
actacaaaagagaagcccca

SEQ ID NO: 1183 - DNA, 19 bp, Artificial Sequence
  Primer
tcaggaacatacgagggca

SEQ ID NO: 1184 - DNA, 19 bp, Artificial Sequence
  Primer
tcaggaacatacgagggca

SEQ ID NO: 1185 - DNA, 19 bp, Artificial Sequence
  Primer
tcaggaacatacgagggca

SEQ ID NO: 1186 - DNA, 24 bp, Artificial Sequence
  Primer
caccaaaactcaaagaagactacc

SEQ ID NO: 1187 - DNA, 20 bp, Artificial Sequence
  Primer
ccaccacagacatcaatcac

SEQ ID NO: 1188 - DNA, 21 bp, Artificial Sequence
  Primer
ctctaccaaccaccacagaca

SEQ ID NO: 1189 - DNA, 18 bp, Artificial Sequence
  Primer
aaaagagaagccccagca

SEQ ID NO: 1190 - DNA, 21 bp, Artificial Sequence
  Primer
gctacacaccttccaaactca

SEQ ID NO: 1191 - DNA, 19 bp, Artificial Sequence
  Primer
caggaacatacgagggcaa

SEQ ID NO: 1192 - DNA, 19 bp, Artificial Sequence
  Primer
caggaacatacgagggcaa

SEQ ID NO: 1193 - DNA, 22 bp, Artificial Sequence
  Primer
gctacaaacaatgtctttcgct

SEQ ID NO: 1194 - DNA, 19 bp, Artificial Sequence
  Primer
ctaccaaccaccacagaca

SEQ ID NO: 1195 - DNA, 18 bp, Artificial Sequence
  Primer
aaaagagaagccccagca

SEQ ID NO: 1196 - DNA, 21 bp, Artificial Sequence
  Primer
cacattgaccatccaaatcct

SEQ ID NO: 1197 - DNA, 22 bp, Artificial Sequence
  Primer
tgacaataaccagaatggagga

SEQ ID NO: 1198 - DNA, 19 bp, Artificial Sequence
  Primer
caggaacatacgagggcaa

SEQ ID NO: 1199 - DNA, 20 bp, Artificial Sequence
  Primer
tcaggaacatacgagggcaa

SEQ ID NO: 1200 - DNA, 19 bp, Artificial Sequence
  Primer
aaaagagaagccccagcac

SEQ ID NO: 1201 - DNA, 19 bp, Artificial Sequence
  Primer
ctaccaaccaccacagaca

SEQ ID NO: 1202 - DNA, 20 bp, Artificial Sequence
  Primer
catctaaaaagcctcgccaa

SEQ ID NO: 1203 - DNA, 21 bp, Artificial Sequence
  Primer
gcatctaaaaagcctcgccaa

SEQ ID NO: 1204 - DNA, 21 bp, Artificial Sequence
  Primer
gcatctaaaaagcctcgccaa

SEQ ID NO: 1205 - DNA, 21 bp, Artificial Sequence
  Primer
catctaaaaagcctcgccaaa

SEQ ID NO: 1206 - DNA, 22 bp, Artificial Sequence
  Primer
gcatctaaaaagcctcgccaaa

SEQ ID NO: 1207 - DNA, 22 bp, Artificial Sequence
  Primer
gcatctaaaaagcctcgccaaa

SEQ ID NO: 1208 - DNA, 20 bp, Artificial Sequence
  Primer
tctaaaaagcctcgccaaaa

SEQ ID NO: 1209 - DNA, 22 bp, Artificial Sequence
  Primer
catctaaaaagcctcgccaaaa

SEQ ID NO: 1210 - DNA, 23 bp, Artificial Sequence
  Primer
gcatctaaaaagcctcgccaaaa

SEQ ID NO: 1211 - DNA, 24 bp, Artificial Sequence
  Primer
gcatctaaaaagcctcgccaaaaa

SEQ ID NO: 1212 - DNA, 24 bp, Artificial Sequence
  Primer
gcatctaaaaagcctcgccaaaaa

SEQ ID NO: 1213 - DNA, 24 bp, Artificial Sequence
  Primer
gcatctaaaaagcctcgccaaaaa

SEQ ID NO: 1214 - DNA, 19 bp, Artificial Sequence
  Primer
tgaggacaagagggcaaaa

SEQ ID NO: 1215 - DNA, 21 bp, Artificial Sequence
  Primer
ggaccaagacctaatcagaca

SEQ ID NO: 1216 - DNA, 22 bp, Artificial Sequence
  Primer
ggaccaagacctaatcagacaa

SEQ ID NO: 1217 - DNA, 22 bp, Artificial Sequence
  Primer
ccaaatacctaccacttgtgct

SEQ ID NO: 1218 - DNA, 20 bp, Artificial Sequence
  Primer
acaaaacattcccaccaaca

SEQ ID NO: 1219 - DNA, 19 bp, Artificial Sequence
  Primer
tcccaccaacagagcctaa

SEQ ID NO: 1220 - DNA, 19 bp, Artificial Sequence
  Primer
tcccaccaacagagcctaa

SEQ ID NO: 1221 - DNA, 19 bp, Artificial Sequence
  Primer
cccaccaacagagcctaaa

SEQ ID NO: 1222 - DNA, 20 bp, Artificial Sequence
  Primer
tcccaccaacagagcctaaa

SEQ ID NO: 1223 - DNA, 20 bp, Artificial Sequence
  Primer
cccaccaacagagcctaaaa

SEQ ID NO: 1224 - DNA, 20 bp, Artificial Sequence
  Primer
cccaccaacagagcctaaaa

SEQ ID NO: 1225 - DNA, 20 bp, Artificial Sequence
  Primer
ccaccaacagagcctaaaaa

SEQ ID NO: 1226 - DNA, 21 bp, Artificial Sequence
  Primer
cccaccaacagagcctaaaaa

SEQ ID NO: 1227 - DNA, 22 bp, Artificial Sequence
  Primer
tcccaccaacagagcctaaaaa

SEQ ID NO: 1228 - DNA, 20 bp, Artificial Sequence
  Primer
ccgcagagacaaaagaagca

SEQ ID NO: 1229 - DNA, 20 bp, Artificial Sequence
  Primer
gagacaaaagaagcagccca

SEQ ID NO: 1230 - DNA, 21 bp, Artificial Sequence
  Primer
gcagattatcacaaccactca

SEQ ID NO: 1231 - DNA, 21 bp, Artificial Sequence
  Primer
ggcattactatcagaccacca

SEQ ID NO: 1232 - DNA, 19 bp, Artificial Sequence
  Primer
cccaggaaaagccaaccaa

SEQ ID NO: 1233 - DNA, 18 bp, Artificial Sequence
  Primer
aaaagagaagccccagca

SEQ ID NO: 1234 - DNA, 19 bp, Artificial Sequence
  Primer
gtcttcatcgctcaaagca

SEQ ID NO: 1235 - DNA, 19 bp, Artificial Sequence
  Primer
acccaggaaaagccaacca

SEQ ID NO: 1236 - DNA, 20 bp, Artificial Sequence
  Primer
ccaaccaccacagacatcaa

SEQ ID NO: 1237 - DNA, 20 bp, Artificial Sequence
  Primer
actacaaaagagaagcccca

SEQ ID NO: 1238 - DNA, 21 bp, Artificial Sequence
  Primer
gctacacaccttccaaactca

SEQ ID NO: 1239 - DNA, 19 bp, Artificial Sequence
  Primer
gtcttcatcgctcaaagca

SEQ ID NO: 1240 - DNA, 22 bp, Artificial Sequence
  Primer
ggctaagcgtaacattaaacca

SEQ ID NO: 1241 - DNA, 20 bp, Artificial Sequence
  Primer
ccaaccaccacagacatcaa

SEQ ID NO: 1242 - DNA, 19 bp, Artificial Sequence
  Primer
gtcttcatcgctcaaagca

SEQ ID NO: 1243 - DNA, 18 bp, Artificial Sequence
  Primer
ggcgacatttcaggcatt

SEQ ID NO: 1244 - DNA, 23 bp, Artificial Sequence
  Primer
cataccaggcataccaaaggaca

SEQ ID NO: 1245 - DNA, 22 bp, Artificial Sequence
  Primer
ggcatttcaacaccaaaactca

SEQ ID NO: 1246 - DNA, 18 bp, Artificial Sequence
  Primer
gacggcatttcaacacca

SEQ ID NO: 1247 - DNA, 19 bp, Artificial Sequence
  Primer
agcaacgataccgctacaa

SEQ ID NO: 1248 - DNA, 21 bp, Artificial Sequence
  Primer
ggcattactatcagaccacca

SEQ ID NO: 1249 - DNA, 19 bp, Artificial Sequence
  Primer
gtgctgccaagaagaacaa

SEQ ID NO: 1250 - DNA, 22 bp, Artificial Sequence
  Primer
gctacaaacaatgtctttcgct

SEQ ID NO: 1251 - DNA, 18 bp, Artificial Sequence
  Primer
agcaacgataccgctaca

SEQ ID NO: 1252 - DNA, 19 bp, Artificial Sequence
  Primer
aaagagaagccccagcaca

SEQ ID NO: 1253 - DNA, 20 bp, Artificial Sequence
  Primer
actttgcttttgcttgtgct

SEQ ID NO: 1254 - DNA, 21 bp, Artificial Sequence
  Primer
gctacacaccttccaaactca

SEQ ID NO: 1255 - DNA, 22 bp, Artificial Sequence
  Primer
gctacaaacaatgtctttcgct

SEQ ID NO: 1256 - DNA, 21 bp, Artificial Sequence
  Primer
caaatacctaccacttgtgct

SEQ ID NO: 1257 - DNA, 25 bp, Artificial Sequence
  Primer
ggttccatcatacagtttcctaaca

SEQ ID NO: 1258 - DNA, 18 bp, Artificial Sequence
  Primer
ccaacaacaacaaggcca

SEQ ID NO: 1259 - DNA, 25 bp, Artificial Sequence
  Primer
ggttccatcatacagtttcctaaca

SEQ ID NO: 1260 - DNA, 24 bp, Artificial Sequence
  Primer
acctgaccctctaaagccaactaa

SEQ ID NO: 1261 - DNA, 20 bp, Artificial Sequence
  Primer
tgacataccaggcataccaa

SEQ ID NO: 1262 - DNA, 19 bp, Artificial Sequence
  Primer
tcaggaacatacgagggca

SEQ ID NO: 1263 - DNA, 23 bp, Artificial Sequence
  Primer
gggaccaagacctaatcagacaa

SEQ ID NO: 1264 - DNA, 19 bp, Artificial Sequence
  Primer
tcaggaacatacgagggca

SEQ ID NO: 1265 - DNA, 23 bp, Artificial Sequence
  Primer
ggggaccaagacctaatcagaca

SEQ ID NO: 1266 - DNA, 21 bp, Artificial Sequence
  Primer
tgacataccaggcataccaaa

SEQ ID NO: 1267 - DNA, 20 bp, Artificial Sequence
  Primer
cggggaccaagacctaatca

SEQ ID NO: 1268 - DNA, 19 bp, Artificial Sequence
  Primer
ccaggcataccaaaggaca

SEQ ID NO: 1269 - DNA, 19 bp, Artificial Sequence
  Primer
ccaggcataccaaaggaca

SEQ ID NO: 1270 - DNA, 19 bp, Artificial Sequence
  Primer
ccaggcataccaaaggaca

SEQ ID NO: 1271 - DNA, 21 bp, Artificial Sequence
  Primer
gcttctgctaatcttgctgct

SEQ ID NO: 1272 - DNA, 23 bp, Artificial Sequence
  Primer
cttctgctaatcttgctgctact

SEQ ID NO: 1273 - DNA, 19 bp, Artificial Sequence
  Primer
caggaacatacgagggcaa

SEQ ID NO: 1274 - DNA, 19 bp, Artificial Sequence
  Primer
caggaacatacgagggcaa

SEQ ID NO: 1275 - DNA, 19 bp, Artificial Sequence
  Primer
caggaacatacgagggcaa

SEQ ID NO: 1276 - DNA, 19 bp, Artificial Sequence
  Primer
ccaggcataccaaaggaca

SEQ ID NO: 1277 - DNA, 20 bp, Artificial Sequence
  Primer
accaggcataccaaaggaca

SEQ ID NO: 1278 - DNA, 20 bp, Artificial Sequence
  Primer
accaccacagacatcaatca

SEQ ID NO: 1279 - DNA, 22 bp, Artificial Sequence
  Primer
gcctttctgctattccttgttt

SEQ ID NO: 1280 - DNA, 21 bp, Artificial Sequence
  Primer
gcctttctgctattccttgtt

SEQ ID NO: 1281 - DNA, 20 bp, Artificial Sequence
  Primer
actttgcttttgcttgtgct

SEQ ID NO: 1282 - DNA, 20 bp, Artificial Sequence
  Primer
ccaacaacaacaaggccaaa

SEQ ID NO: 1283 - DNA, 19 bp, Artificial Sequence
  Primer
ccaacaacaacaaggccaa

SEQ ID NO: 1284 - DNA, 22 bp, Artificial Sequence
  Primer
ctacacaccttccaaactcatt

SEQ ID NO: 1285 - DNA, 19 bp, Artificial Sequence
  Primer
aaaagagaagccccagcac

SEQ ID NO: 1286 - DNA, 25 bp, Artificial Sequence
  Primer
ggttccatcatacagtttcctaaca

SEQ ID NO: 1287 - DNA, 22 bp, Artificial Sequence
  Primer
tcattcgcaaatccaaccatag

SEQ ID NO: 1288 - DNA, 21 bp, Artificial Sequence
  Primer
ggcattactatcagaccacca

SEQ ID NO: 1289 - DNA, 25 bp, Artificial Sequence
  Primer
ggttccatcatacagtttcctaaca

SEQ ID NO: 1290 - DNA, 20 bp, Artificial Sequence
  Primer
tgccaacctattctgttgct

SEQ ID NO: 1291 - DNA, 21 bp, Artificial Sequence
  Primer
tgaccctctaaagccaactaa

SEQ ID NO: 1292 - DNA, 21 bp, Artificial Sequence
  Primer
cttctaaccctaagacaccca

SEQ ID NO: 1293 - DNA, 21 bp, Artificial Sequence
  Primer
ccaaaaacaaatcgccaacca

SEQ ID NO: 1294 - DNA, 21 bp, Artificial Sequence
  Primer
aggacaagagggcaaaagtaa

SEQ ID NO: 1295 - DNA, 21 bp, Artificial Sequence
  Primer
gctgatgtgccaacctattct

SEQ ID NO: 1296 - DNA, 21 bp, Artificial Sequence
  Primer
gcagattatcacaaccactca

SEQ ID NO: 1297 - DNA, 19 bp, Artificial Sequence
  Primer
ctgaggacaagagggcaaa

SEQ ID NO: 1298 - DNA, 21 bp, Artificial Sequence
  Primer
agatgaggaagaagaggacga

SEQ ID NO: 1299 - DNA, 19 bp, Artificial Sequence
  Primer
ctgaggacaagagggcaaa

SEQ ID NO: 1300 - DNA, 21 bp, Artificial Sequence
  Primer
tctgctaatcttgctgctact

SEQ ID NO: 1301 - DNA, 21 bp, Artificial Sequence
  Primer
ctattgttgctgctgctactt

SEQ ID NO: 1302 - DNA, 22 bp, Artificial Sequence
  Primer
atgtgccatcccaggagaggaa

SEQ ID NO: 1303 - DNA, 22 bp, Artificial Sequence
  Primer
atgtgccatcccaggagaggaa

SEQ ID NO: 1304 - DNA, 19 bp, Artificial Sequence
  Primer
tcccaggagaggaacttca

SEQ ID NO: 1305 - DNA, 18 bp, Artificial Sequence
  Primer
accaaccaccacagacat

SEQ ID NO: 1306 - DNA, 19 bp, Artificial Sequence
  Primer
caggagaggaacttcacca

SEQ ID NO: 1307 - DNA, 20 bp, Artificial Sequence
  Primer
ctattgttgctgctgctact

SEQ ID NO: 1308 - DNA, 19 bp, Artificial Sequence
  Primer
ggagaggaacttcaccaca

SEQ ID NO: 1309 - DNA, 20 bp, Artificial Sequence
  Primer
accaccacagacatcaatca

SEQ ID NO: 1310 - DNA, 18 bp, Artificial Sequence
  Primer
ggcgacatttcaggcatt

SEQ ID NO: 1311 - DNA, 19 bp, Artificial Sequence
  Primer
acatccgctctcccatttt

SEQ ID NO: 1312 - DNA, 22 bp, Artificial Sequence
  Primer
gcacccgcaatcctaataacaa

SEQ ID NO: 1313 - DNA, 22 bp, Artificial Sequence
  Primer
gcacccgcaatcctaataacaa

SEQ ID NO: 1314 - DNA, 21 bp, Artificial Sequence
  Primer
cacccgcaatcctaataacaa

SEQ ID NO: 1315 - DNA, 22 bp, Artificial Sequence
  Primer
ggcacccgcaatcctaataaca

SEQ ID NO: 1316 - DNA, 21 bp, Artificial Sequence
  Primer
gcacccgcaatcctaataaca

SEQ ID NO: 1317 - DNA, 20 bp, Artificial Sequence
  Primer
ggcacccgcaatcctaataa

SEQ ID NO: 1318 - DNA, 20 bp, Artificial Sequence
  Primer
ggcacccgcaatcctaataa

SEQ ID NO: 1319 - DNA, 21 bp, Artificial Sequence
  Primer
ggtgacggcaaaatgaaagag

SEQ ID NO: 1320 - DNA, 20 bp, Artificial Sequence
  Primer
ggtgacggcaaaatgaaaga

SEQ ID NO: 1321 - DNA, 20 bp, Artificial Sequence
  Primer
ggtgacggcaaaatgaaaga

SEQ ID NO: 1322 - DNA, 20 bp, Artificial Sequence
  Primer
gtgctttccttctgtgcttt

SEQ ID NO: 1323 - DNA, 18 bp, Artificial Sequence
  Primer
gcagcagaaacgctcaaa

SEQ ID NO: 1324 - DNA, 20 bp, Artificial Sequence
  Primer
tggtgacggcaaaatgaaag

SEQ ID NO: 1325 - DNA, 18 bp, Artificial Sequence
  Primer
cagaaacgctcaaagcca

SEQ ID NO: 1326 - DNA, 20 bp, Artificial Sequence
  Primer
gtggtgacggcaaaatgaaa

SEQ ID NO: 1327 - DNA, 19 bp, Artificial Sequence
  Primer
tggtgacggcaaaatgaaa

SEQ ID NO: 1328 - DNA, 19 bp, Artificial Sequence
  Primer
tccgctctcccattttgtc

SEQ ID NO: 1329 - DNA, 19 bp, Artificial Sequence
  Primer
gtggtgacggcaaaatgaa

SEQ ID NO: 1330 - DNA, 19 bp, Artificial Sequence
  Primer
gtggtgacggcaaaatgaa

SEQ ID NO: 1331 - DNA, 20 bp, Artificial Sequence
  Primer
attgttgctgctgctacttt

SEQ ID NO: 1332 - DNA, 19 bp, Artificial Sequence
  Primer
ggtggtgacggcaaaatga

SEQ ID NO: 1333 - DNA, 18 bp, Artificial Sequence
  Primer
gtggtgacggcaaaatga

SEQ ID NO: 1334 - DNA, 22 bp, Artificial Sequence
  Primer
gcacctaatgctaaggaagaga

SEQ ID NO: 1335 - DNA, 20 bp, Artificial Sequence
  Primer
tgtgctttccttctgtgctt

SEQ ID NO: 1336 - DNA, 19 bp, Artificial Sequence
  Primer
ccaaccaccacagacatca

SEQ ID NO: 1337 - DNA, 22 bp, Artificial Sequence
  Primer
gcctttctgctattccttgttt

SEQ ID NO: 1338 - DNA, 22 bp, Artificial Sequence
  Primer
gcctttctgctattccttgttt

SEQ ID NO: 1339 - DNA, 21 bp, Artificial Sequence
  Primer
ctattgttgctgctgctactt

SEQ ID NO: 1340 - DNA, 21 bp, Artificial Sequence
  Primer
gcctttctgctattccttgtt

SEQ ID NO: 1341 - DNA, 20 bp, Artificial Sequence
  Primer
attgttgctgctgctacttt

SEQ ID NO: 1342 - DNA, 19 bp, Artificial Sequence
  Primer
tgttgctgctgctactttg

SEQ ID NO: 1343 - DNA, 20 bp, Artificial Sequence
  Primer
gcacacactttgcttttgct

SEQ ID NO: 1344 - DNA, 20 bp, Artificial Sequence
  Primer
gcacacactttgcttttgct

SEQ ID NO: 1345 - DNA, 19 bp, Artificial Sequence
  Primer
accatttcaccctcttgct

SEQ ID NO: 1346 - DNA, 19 bp, Artificial Sequence
  Primer
accatttcaccctcttgct

SEQ ID NO: 1347 - DNA, 24 bp, Artificial Sequence
  Primer
ggaacatacgagggcaattcacca

SEQ ID NO: 1348 - DNA, 23 bp, Artificial Sequence
  Primer
caggaacatacgagggcaattca

SEQ ID NO: 1349 - DNA, 20 bp, Artificial Sequence
  Primer
ctattgttgctgctgctact

SEQ ID NO: 1350 - DNA, 18 bp, Artificial Sequence
  Primer
acatccgctctcccattt

SEQ ID NO: 1351 - DNA, 21 bp, Artificial Sequence
  Primer
catcgtcaagggtcaaataca

SEQ ID NO: 1352 - DNA, 20 bp, Artificial Sequence
  Primer
ccaaccaccacagacatcaa

SEQ ID NO: 1353 - DNA, 20 bp, Artificial Sequence
  Primer
ccaccacagacatcaatcac

SEQ ID NO: 1354 - DNA, 21 bp, Artificial Sequence
  Primer
catcgtcaagggtcaaataca

SEQ ID NO: 1355 - DNA, 19 bp, Artificial Sequence
  Primer
agccaccaaacacagaaga

SEQ ID NO: 1356 - DNA, 20 bp, Artificial Sequence
  Primer
ccaccacagacatcaatcac

SEQ ID NO: 1357 - DNA, 20 bp, Artificial Sequence
  Primer
tgacataccaggcataccaa

SEQ ID NO: 1358 - DNA, 19 bp, Artificial Sequence
  Primer
gtgctttccttctgtgctt

SEQ ID NO: 1359 - DNA, 18 bp, Artificial Sequence
  Primer
tatgccgcttatgccact

SEQ ID NO: 1360 - DNA, 18 bp, Artificial Sequence
  Primer
tatgccgcttatgccact

SEQ ID NO: 1361 - DNA, 18 bp, Artificial Sequence
  Primer
gctattgttgctgctgct

SEQ ID NO: 1362 - DNA, 19 bp, Artificial Sequence
  Primer
tgtgctttccttctgtgct

SEQ ID NO: 1363 - DNA, 19 bp, Artificial Sequence
  Primer
tgtgctttccttctgtgct

SEQ ID NO: 1364 - DNA, 21 bp, Artificial Sequence
  Primer
gctattgttgctgctgctact

SEQ ID NO: 1365 - DNA, 18 bp, Artificial Sequence
  Primer
tatgccgcttatgccact

SEQ ID NO: 1366 - DNA, 20 bp, Artificial Sequence
  Primer
gtgctttccttctgtgcttt

SEQ ID NO: 1367 - DNA, 19 bp, Artificial Sequence
  Primer
ggaggacaaccaatcacca

SEQ ID NO: 1368 - DNA, 20 bp, Artificial Sequence
  Primer
gcccatcaggaacatacgag

SEQ ID NO: 1369 - DNA, 20 bp, Artificial Sequence
  Primer
gcccatcaggaacatacgag

SEQ ID NO: 1370 - DNA, 20 bp, Artificial Sequence
  Primer
gcccatcaggaacatacgag

SEQ ID NO: 1371 - DNA, 18 bp, Artificial Sequence
  Primer
agcaacgataccgctaca

SEQ ID NO: 1372 - DNA, 20 bp, Artificial Sequence
  Primer
gttctctaccaaccaccaca

SEQ ID NO: 1373 - DNA, 19 bp, Artificial Sequence
  Primer
ggaggacaaccaatcacca

SEQ ID NO: 1374 - DNA, 19 bp, Artificial Sequence
  Primer
gaggacaagagggcaaaag

SEQ ID NO: 1375 - DNA, 21 bp, Artificial Sequence
  Primer
tgttccttttaccctccagat

SEQ ID NO: 1376 - DNA, 19 bp, Artificial Sequence
  Primer
ggaggacaaccaatcacca

SEQ ID NO: 1377 - DNA, 21 bp, Artificial Sequence
  Primer
gctgatgtgccaacctattct

SEQ ID NO: 1378 - DNA, 21 bp, Artificial Sequence
  Primer
acaactcctggaacaatggaa

SEQ ID NO: 1379 - DNA, 21 bp, Artificial Sequence
  Primer
acaactcctggaacaatggaa

SEQ ID NO: 1380 - DNA, 22 bp, Artificial Sequence
  Primer
atgatgagccgacgacgactac

SEQ ID NO: 1381 - DNA, 22 bp, Artificial Sequence
  Primer
atgatgagccgacgacgactac

SEQ ID NO: 1382 - DNA, 22 bp, Artificial Sequence
  Primer
atgatgagccgacgacgactac

SEQ ID NO: 1383 - DNA, 19 bp, Artificial Sequence
  Primer
actacagcagccaaactca

SEQ ID NO: 1384 - DNA, 22 bp, Artificial Sequence
  Primer
atgatgagccgacgacgactac

SEQ ID NO: 1385 - DNA, 20 bp, Artificial Sequence
  Primer
tatgatgagccgacgacgac

SEQ ID NO: 1386 - DNA, 20 bp, Artificial Sequence
  Primer
tatgatgagccgacgacgac

SEQ ID NO: 1387 - DNA, 20 bp, Artificial Sequence
  Primer
tatgatgagccgacgacgac

SEQ ID NO: 1388 - DNA, 20 bp, Artificial Sequence
  Primer
tatgatgagccgacgacgac

SEQ ID NO: 1389 - DNA, 19 bp, Artificial Sequence
  Primer
tatgatgagccgacgacga

SEQ ID NO: 1390 - DNA, 21 bp, Artificial Sequence
  Primer
acttctaaccctaagacaccc

SEQ ID NO: 1391 - DNA, 21 bp, Artificial Sequence
  Primer
agaacctacacctgaagaacc

SEQ ID NO: 1392 - DNA, 19 bp, Artificial Sequence
  Primer
tatgatgagccgacgacga

SEQ ID NO: 1393 - DNA, 18 bp, Artificial Sequence
  Primer
gctattgttgctgctgct

SEQ ID NO: 1394 - DNA, 21 bp, Artificial Sequence
  Primer
agaacctacacctgaagaacc

SEQ ID NO: 1395 - DNA, 19 bp, Artificial Sequence
  Primer
aggagccaccaaacacaga

SEQ ID NO: 1396 - DNA, 19 bp, Artificial Sequence
  Primer
aggagccaccaaacacaga

SEQ ID NO: 1397 - DNA, 21 bp, Artificial Sequence
  Primer
agaacctacacctgaagaacc

SEQ ID NO: 1398 - DNA, 21 bp, Artificial Sequence
  Primer
agaacctacacctgaagaacc

SEQ ID NO: 1399 - DNA, 20 bp, Artificial Sequence
  Primer
ccagaaccagaacctacacc

SEQ ID NO: 1400 - DNA, 19 bp, Artificial Sequence
  Primer
agccaccaaacacagaaga

SEQ ID NO: 1401 - DNA, 20 bp, Artificial Sequence
  Primer
ccagaaccagaacctacacc

SEQ ID NO: 1402 - DNA, 19 bp, Artificial Sequence
  Primer
gcaagtcacataagcctcc

SEQ ID NO: 1403 - DNA, 25 bp, Artificial Sequence
  Primer
caccaaaactcaaagaagactacca

SEQ ID NO: 1404 - DNA, 20 bp, Artificial Sequence
  Primer
gcaagtcacataagcctccc

SEQ ID NO: 1405 - DNA, 20 bp, Artificial Sequence
  Primer
caagtcacataagcctccca

SEQ ID NO: 1406 - DNA, 21 bp, Artificial Sequence
  Primer
aggacaagagggcaaaagtaa

SEQ ID NO: 1407 - DNA, 20 bp, Artificial Sequence
  Primer
caagtcacataagcctccca

SEQ ID NO: 1408 - DNA, 20 bp, Artificial Sequence
  Primer
caagtcacataagcctccca

SEQ ID NO: 1409 - DNA, 20 bp, Artificial Sequence
  Primer
ccagaaccagaacctacacc

SEQ ID NO: 1410 - DNA, 19 bp, Artificial Sequence
  Primer
ttcgcagcagaaacgctca

SEQ ID NO: 1411 - DNA, 19 bp, Artificial Sequence
  Primer
tcgcagcagaaacgctcaa

SEQ ID NO: 1412 - DNA, 19 bp, Artificial Sequence
  Primer
gataccgctacaagcctca

SEQ ID NO: 1413 - DNA, 18 bp, Artificial Sequence
  Primer
gcagcagaaacgctcaaa

SEQ ID NO: 1414 - DNA, 19 bp, Artificial Sequence
  Primer
agcaacgataccgctacaa

SEQ ID NO: 1415 - DNA, 18 bp, Artificial Sequence
  Primer
gcagcagaaacgctcaaa

SEQ ID NO: 1416 - DNA, 19 bp, Artificial Sequence
  Primer
acatccgctctcccatttt

SEQ ID NO: 1417 - DNA, 25 bp, Artificial Sequence
  Primer
ccaacagagcctaaaaaggacaaaa

SEQ ID NO: 1418 - DNA, 25 bp, Artificial Sequence
  Primer
ccaacagagcctaaaaaggacaaaa

SEQ ID NO: 1419 - DNA, 24 bp, Artificial Sequence
  Primer
ccaacagagcctaaaaaggacaaa

SEQ ID NO: 1420 - DNA, 24 bp, Artificial Sequence
  Primer
ccaacagagcctaaaaaggacaaa

SEQ ID NO: 1421 - DNA, 24 bp, Artificial Sequence
  Primer
accaacagagcctaaaaaggacaa

SEQ ID NO: 1422 - DNA, 23 bp, Artificial Sequence
  Primer
ccaacagagcctaaaaaggacaa

SEQ ID NO: 1423 - DNA, 23 bp, Artificial Sequence
  Primer
accaacagagcctaaaaaggaca

SEQ ID NO: 1424 - DNA, 22 bp, Artificial Sequence
  Primer
ccaacagagcctaaaaaggaca

SEQ ID NO: 1425 - DNA, 20 bp, Artificial Sequence
  Primer
tgacataccaggcataccaa

SEQ ID NO: 1426 - DNA, 20 bp, Artificial Sequence
  Primer
tgacataccaggcataccaa

SEQ ID NO: 1427 - DNA, 25 bp, Artificial Sequence
  Primer
gcagattatcacaaccactcaaaca

SEQ ID NO: 1428 - DNA, 21 bp, Artificial Sequence
  Primer
tgacataccaggcataccaaa

SEQ ID NO: 1429 - DNA, 21 bp, Artificial Sequence
  Primer
tgacataccaggcataccaaa

SEQ ID NO: 1430 - DNA, 21 bp, Artificial Sequence
  Primer
tgacataccaggcataccaaa

SEQ ID NO: 1431 - DNA, 20 bp, Artificial Sequence
  Primer
ccagaaccagaacctacacc

SEQ ID NO: 1432 - DNA, 19 bp, Artificial Sequence
  Primer
ccaggcataccaaaggaca

SEQ ID NO: 1433 - DNA, 18 bp, Artificial Sequence
  Primer
acatccgctctcccattt

SEQ ID NO: 1434 - DNA, 24 bp, Artificial Sequence
  Primer
gcatacaaaacattcccaccaaca

SEQ ID NO: 1435 - DNA, 22 bp, Artificial Sequence
  Primer
gcacctaatgctaaggaagaga

SEQ ID NO: 1436 - DNA, 22 bp, Artificial Sequence
  Primer
catacaaaacattcccaccaac

SEQ ID NO: 1437 - DNA, 19 bp, Artificial Sequence
  Primer
gccagaaccagaacctaca

SEQ ID NO: 1438 - DNA, 22 bp, Artificial Sequence
  Primer
cgcatacaaaacattcccacca

SEQ ID NO: 1439 - DNA, 21 bp, Artificial Sequence
  Primer
gcatacaaaacattcccacca

SEQ ID NO: 1440 - DNA, 20 bp, Artificial Sequence
  Primer
acgcatacaaaacattccca

SEQ ID NO: 1441 - DNA, 24 bp, Artificial Sequence
  Primer
accaagacctaatcagacaaggaa

SEQ ID NO: 1442 - DNA, 23 bp, Artificial Sequence
  Primer
ccaagacctaatcagacaaggaa

SEQ ID NO: 1443 - DNA, 22 bp, Artificial Sequence
  Primer
gcacctaatgctaaggaagaga

SEQ ID NO: 1444 - DNA, 21 bp, Artificial Sequence
  Primer
gtgctttccttctgtgctttt

SEQ ID NO: 1445 - DNA, 22 bp, Artificial Sequence
  Primer
ggaccaagacctaatcagacaa

SEQ ID NO: 1446 - DNA, 19 bp, Artificial Sequence
  Primer
gccagaaccagaacctaca

SEQ ID NO: 1447 - DNA, 19 bp, Artificial Sequence
  Primer
gccagaaccagaacctaca

SEQ ID NO: 1448 - DNA, 19 bp, Artificial Sequence
  Primer
gccagaaccagaacctaca

SEQ ID NO: 1449 - DNA, 23 bp, Artificial Sequence
  Primer
ggtccagaacaaacccaaggaaa

SEQ ID NO: 1450 - DNA, 21 bp, Artificial Sequence
  Primer
tccagaacaaacccaaggaaa

SEQ ID NO: 1451 - DNA, 20 bp, Artificial Sequence
  Primer
gctacacaccttccaaactc

SEQ ID NO: 1452 - DNA, 22 bp, Artificial Sequence
  Primer
ggtccagaacaaacccaaggaa

SEQ ID NO: 1453 - DNA, 21 bp, Artificial Sequence
  Primer
gtccagaacaaacccaaggaa

SEQ ID NO: 1454 - DNA, 20 bp, Artificial Sequence
  Primer
tccagaacaaacccaaggaa

SEQ ID NO: 1455 - DNA, 21 bp, Artificial Sequence
  Primer
tgctgctaacatacacctgaa

SEQ ID NO: 1456 - DNA, 22 bp, Artificial Sequence
  Primer
ggctaagcgtaacattaaacca

SEQ ID NO: 1457 - DNA, 19 bp, Artificial Sequence
  Primer
actacagcagccaaactca

SEQ ID NO: 1458 - DNA, 20 bp, Artificial Sequence
  Primer
gactacaaaagagaagcccc

SEQ ID NO: 1459 - DNA, 21 bp, Artificial Sequence
  Primer
gctgctaacatacacctgaaa

SEQ ID NO: 1460 - DNA, 19 bp, Artificial Sequence
  Primer
tgaggacaagagggcaaaa

SEQ ID NO: 1461 - DNA, 19 bp, Artificial Sequence
  Primer
tgaggacaagagggcaaaa

SEQ ID NO: 1462 - DNA, 20 bp, Artificial Sequence
  Primer
gatgaggaagaagaggacga

SEQ ID NO: 1463 - DNA, 21 bp, Artificial Sequence
  Primer
gctacacaccttccaaactca

SEQ ID NO: 1464 - DNA, 21 bp, Artificial Sequence
  Primer
ggcattactatcagaccacca

SEQ ID NO: 1465 - DNA, 19 bp, Artificial Sequence
  Primer
tgaggacaagagggcaaaa

SEQ ID NO: 1466 - DNA, 19 bp, Artificial Sequence
  Primer
tctaccaaccaccacagac

SEQ ID NO: 1467 - DNA, 20 bp, Artificial Sequence
  Primer
gatgaggaagaagaggacga

SEQ ID NO: 1468 - DNA, 20 bp, Artificial Sequence
  Primer
tgctttccttctgtgctttt

SEQ ID NO: 1469 - DNA, 19 bp, Artificial Sequence
  Primer
caaaagagaagccccagca

SEQ ID NO: 1470 - DNA, 21 bp, Artificial Sequence
  Primer
gctacacaccttccaaactca

SEQ ID NO: 1471 - DNA, 21 bp, Artificial Sequence
  Primer
gctacacaccttccaaactca

SEQ ID NO: 1472 - DNA, 20 bp, Artificial Sequence
  Primer
ctcattcgcaaatccaacca

SEQ ID NO: 1473 - DNA, 22 bp, Artificial Sequence
  Primer
gctggatgatactactgagcaa

SEQ ID NO: 1474 - DNA, 20 bp, Artificial Sequence
  Primer
tgctgctaacatacacctga

SEQ ID NO: 1475 - DNA, 19 bp, Artificial Sequence
  Primer
caggaacatacgagggcaa

SEQ ID NO: 1476 - DNA, 25 bp, Artificial Sequence
  Primer
ctaaccctaagacacccaagtataa

SEQ ID NO: 1477 - DNA, 19 bp, Artificial Sequence
  Primer
caggaacatacgagggcaa

SEQ ID NO: 1478 - DNA, 19 bp, Artificial Sequence
  Primer
caggaacatacgagggcaa

SEQ ID NO: 1479 - DNA, 21 bp, Artificial Sequence
  Primer
gctacacaccttccaaactca

SEQ ID NO: 1480 - DNA, 19 bp, Artificial Sequence
  Primer
caggaacatacgagggcaa

SEQ ID NO: 1481 - DNA, 19 bp, Artificial Sequence
  Primer
caggaacatacgagggcaa

SEQ ID NO: 1482 - DNA, 21 bp, Artificial Sequence
  Primer
gggtaaccttcagagtaacca

SEQ ID NO: 1483 - DNA, 21 bp, Artificial Sequence
  Primer
gggtaaccttcagagtaacca

SEQ ID NO: 1484 - DNA, 20 bp, Artificial Sequence
  Primer
ggctttacgggtaaccttca

SEQ ID NO: 1485 - DNA, 20 bp, Artificial Sequence
  Primer
atcaggaacatacgagggca

SEQ ID NO: 1486 - DNA, 20 bp, Artificial Sequence
  Primer
ggctttacgggtaaccttca

SEQ ID NO: 1487 - DNA, 21 bp, Artificial Sequence
  Primer
gctgctaacatacacctgaaa

SEQ ID NO: 1488 - DNA, 21 bp, Artificial Sequence
  Primer
gctgctaacatacacctgaaa

SEQ ID NO: 1489 - DNA, 20 bp, Artificial Sequence
  Primer
cacctaaacaagaggagcca

SEQ ID NO: 1490 - DNA, 20 bp, Artificial Sequence
  Primer
ggaggacaaccaatcaccaa

SEQ ID NO: 1491 - DNA, 20 bp, Artificial Sequence
  Primer
cacctaaacaagaggagcca

SEQ ID NO: 1492 - DNA, 20 bp, Artificial Sequence
  Primer
gaggacaaccaatcaccaac

SEQ ID NO: 1493 - DNA, 21 bp, Artificial Sequence
  Primer
catcgtcaagggtcaaataca

SEQ ID NO: 1494 - DNA, 18 bp, Artificial Sequence
  Primer
accaaccaccacagacat

SEQ ID NO: 1495 - DNA, 21 bp, Artificial Sequence
  Primer
cataccaggcataccaaagga

SEQ ID NO: 1496 - DNA, 20 bp, Artificial Sequence
  Primer
tgctgctaacatacacctga

SEQ ID NO: 1497 - DNA, 24 bp, Artificial Sequence
  Primer
ggtcattcaacccagaaacaaaca

SEQ ID NO: 1498 - DNA, 24 bp, Artificial Sequence
  Primer
ggtcattcaacccagaaacaaaca

SEQ ID NO: 1499 - DNA, 24 bp, Artificial Sequence
  Primer
ggtcattcaacccagaaacaaaca

SEQ ID NO: 1500 - DNA, 19 bp, Artificial Sequence
  Primer
cccaggaaaagccaaccaa

SEQ ID NO: 1501 - DNA, 20 bp, Artificial Sequence
  Primer
ggtcattcaacccagaaaca

SEQ ID NO: 1502 - DNA, 21 bp, Artificial Sequence
  Primer
tgctgctaacatacacctgaa

SEQ ID NO: 1503 - DNA, 20 bp, Artificial Sequence
  Primer
ggtcattcaacccagaaaca

SEQ ID NO: 1504 - DNA, 19 bp, Artificial Sequence
  Primer
aagagctacgagcaccaga

SEQ ID NO: 1505 - DNA, 24 bp, Artificial Sequence
  Primer
ccactcaacatcataccattgact

SEQ ID NO: 1506 - DNA, 21 bp, Artificial Sequence
  Primer
tgctgctaacatacacctgaa

SEQ ID NO: 1507 - DNA, 21 bp, Artificial Sequence
  Primer
tgacataccaggcataccaaa

SEQ ID NO: 1508 - DNA, 21 bp, Artificial Sequence
  Primer
tgctgctaacatacacctgaa

SEQ ID NO: 1509 - DNA, 22 bp, Artificial Sequence
  Primer
gctgccaagaagaacaacatac

SEQ ID NO: 1510 - DNA, 18 bp, Artificial Sequence
  Primer
accaaccaccacagacat

SEQ ID NO: 1511 - DNA, 21 bp, Artificial Sequence
  Primer
acaactcctggaacaatggaa

SEQ ID NO: 1512 - DNA, 25 bp, Artificial Sequence
  Primer
ctaaccctaagacacccaagtataa

SEQ ID NO: 1513 - DNA, 20 bp, Artificial Sequence
  Primer
tgacataccaggcataccaa

SEQ ID NO: 1514 - DNA, 20 bp, Artificial Sequence
  Primer
acaggcacctacacacctca

SEQ ID NO: 1515 - DNA, 20 bp, Artificial Sequence
  Primer
acaggcacctacacacctca

SEQ ID NO: 1516 - DNA, 20 bp, Artificial Sequence
  Primer
acaggcacctacacacctca

SEQ ID NO: 1517 - DNA, 20 bp, Artificial Sequence
  Primer
acaggcacctacacacctca

SEQ ID NO: 1518 - DNA, 20 bp, Artificial Sequence
  Primer
acaggcacctacacacctca

SEQ ID NO: 1519 - DNA, 20 bp, Artificial Sequence
  Primer
acaggcacctacacacctca

SEQ ID NO: 1520 - DNA, 20 bp, Artificial Sequence
  Primer
cctacacaggcacctacaca

SEQ ID NO: 1521 - DNA, 19 bp, Artificial Sequence
  Primer
ctacacaggcacctacaca

SEQ ID NO: 1522 - DNA, 19 bp, Artificial Sequence
  Primer
ctacacaggcacctacaca

SEQ ID NO: 1523 - DNA, 19 bp, Artificial Sequence
  Primer
ctacacaggcacctacaca

SEQ ID NO: 1524 - DNA, 19 bp, Artificial Sequence
  Primer
ctacacaggcacctacaca

SEQ ID NO: 1525 - DNA, 19 bp, Artificial Sequence
  Primer
ctacacaggcacctacaca

SEQ ID NO: 1526 - DNA, 21 bp, Artificial Sequence
  Primer
catcctacacaggcacctaca

SEQ ID NO: 1527 - DNA, 19 bp, Artificial Sequence
  Primer
tcctacacaggcacctaca

SEQ ID NO: 1528 - DNA, 19 bp, Artificial Sequence
  Primer
tcctacacaggcacctaca

SEQ ID NO: 1529 - DNA, 19 bp, Artificial Sequence
  Primer
tcctacacaggcacctaca

SEQ ID NO: 1530 - DNA, 19 bp, Artificial Sequence
  Primer
tcctacacaggcacctaca

SEQ ID NO: 1531 - DNA, 24 bp, Artificial Sequence
  Primer
cataagcctcccattagttttcca

SEQ ID NO: 1532 - DNA, 20 bp, Artificial Sequence
  Primer
agcctcccattagttttcca

SEQ ID NO: 1533 - DNA, 21 bp, Artificial Sequence
  Primer
catcgtcaagggtcaaataca

SEQ ID NO: 1534 - DNA, 20 bp, Artificial Sequence
  Primer
ctgcaactactcatgcctct

SEQ ID NO: 1535 - DNA, 19 bp, Artificial Sequence
  Primer
ttcgcagcagaaacgctca

SEQ ID NO: 1536 - DNA, 20 bp, Artificial Sequence
  Primer
caagtcacataagcctccca

SEQ ID NO: 1537 - DNA, 20 bp, Artificial Sequence
  Primer
aaccagaacctacacctgaa

SEQ ID NO: 1538 - DNA, 20 bp, Artificial Sequence
  Primer
gaaaacatgacgcccagaga

SEQ ID NO: 1539 - DNA, 21 bp, Artificial Sequence
  Primer
ccagaacctacacctgaagaa

SEQ ID NO: 1540 - DNA, 21 bp, Artificial Sequence
  Primer
ccagaacctacacctgaagaa

SEQ ID NO: 1541 - DNA, 20 bp, Artificial Sequence
  Primer
caagtcacataagcctccca

SEQ ID NO: 1542 - DNA, 20 bp, Artificial Sequence
  Primer
gcaagtcacataagcctccc

SEQ ID NO: 1543 - DNA, 19 bp, Artificial Sequence
  Primer
ccaaccaccacagacatca

SEQ ID NO: 1544 - DNA, 19 bp, Artificial Sequence
  Primer
ttgactacagcagccaaac

SEQ ID NO: 1545 - DNA, 19 bp, Artificial Sequence
  Primer
gataccgctacaagcctca

SEQ ID NO: 1546 - DNA, 19 bp, Artificial Sequence
  Primer
gataccgctacaagcctca

SEQ ID NO: 1547 - DNA, 19 bp, Artificial Sequence
  Primer
gataccgctacaagcctca

SEQ ID NO: 1548 - DNA, 21 bp, Artificial Sequence
  Primer
gcagattatcacaaccactca

SEQ ID NO: 1549 - DNA, 19 bp, Artificial Sequence
  Primer
gataccgctacaagcctca

SEQ ID NO: 1550 - DNA, 19 bp, Artificial Sequence
  Primer
agccaccaaacacagaaga

SEQ ID NO: 1551 - DNA, 19 bp, Artificial Sequence
  Primer
gataccgctacaagcctca

SEQ ID NO: 1552 - DNA, 19 bp, Artificial Sequence
  Primer
agccaccaaacacagaaga

SEQ ID NO: 1553 - DNA, 20 bp, Artificial Sequence
  Primer
cttctgctaatcttgctgct

SEQ ID NO: 1554 - DNA, 19 bp, Artificial Sequence
  Primer
agcaacgataccgctacaa

SEQ ID NO: 1555 - DNA, 19 bp, Artificial Sequence
  Primer
agcaacgataccgctacaa

SEQ ID NO: 1556 - DNA, 22 bp, Artificial Sequence
  Primer
cagacttcaaagccttcaaacc

SEQ ID NO: 1557 - DNA, 21 bp, Artificial Sequence
  Primer
agacttcaaagccttcaaacc

SEQ ID NO: 1558 - DNA, 18 bp, Artificial Sequence
  Primer
agcaacgataccgctaca

SEQ ID NO: 1559 - DNA, 18 bp, Artificial Sequence
  Primer
agcaacgataccgctaca

SEQ ID NO: 1560 - DNA, 18 bp, Artificial Sequence
  Primer
agcaacgataccgctaca

SEQ ID NO: 1561 - DNA, 18 bp, Artificial Sequence
  Primer
agcaacgataccgctaca

SEQ ID NO: 1562 - DNA, 19 bp, Artificial Sequence
  Primer
ttctacgcagagggaagca

SEQ ID NO: 1563 - DNA, 21 bp, Artificial Sequence
  Primer
gctacacaccttccaaactca

SEQ ID NO: 1564 - DNA, 19 bp, Artificial Sequence
  Primer
gccaacaacaacaaggcca

SEQ ID NO: 1565 - DNA, 21 bp, Artificial Sequence
  Primer
atcaggaacatacgagggcaa

SEQ ID NO: 1566 - DNA, 20 bp, Artificial Sequence
  Primer
gccaacaacaacaaggccaa

SEQ ID NO: 1567 - DNA, 20 bp, Artificial Sequence
  Primer
gccaacaacaacaaggccaa

SEQ ID NO: 1568 - DNA, 20 bp, Artificial Sequence
  Primer
ccaacaacaacaaggccaaa

SEQ ID NO: 1569 - DNA, 20 bp, Artificial Sequence
  Primer
gaacatacgagggcaattca

SEQ ID NO: 1570 - DNA, 21 bp, Artificial Sequence
  Primer
gccaacaacaacaaggccaaa

SEQ ID NO: 1571 - DNA, 20 bp, Artificial Sequence
  Primer
gaacatacgagggcaattca

SEQ ID NO: 1572 - DNA, 19 bp, Artificial Sequence
  Primer
tgcaactactcatgcctct

SEQ ID NO: 1573 - DNA, 18 bp, Artificial Sequence
  Primer
tacgagggcaattcacca

SEQ ID NO: 1574 - DNA, 18 bp, Artificial Sequence
  Primer
tacgagggcaattcacca

SEQ ID NO: 1575 - DNA, 20 bp, Artificial Sequence
  Primer
actacaaaagagaagcccca

SEQ ID NO: 1576 - DNA, 22 bp, Artificial Sequence
  Primer
tgaggaagaagaagaggaagac

SEQ ID NO: 1577 - DNA, 22 bp, Artificial Sequence
  Primer
tgaggaagaagaagaggaagac

SEQ ID NO: 1578 - DNA, 19 bp, Artificial Sequence
  Primer
tcctacacaggcacctaca

SEQ ID NO: 1579 - DNA, 20 bp, Artificial Sequence
  Primer
gataagagctacgagcacca

SEQ ID NO: 1580 - DNA, 21 bp, Artificial Sequence
  Primer
ccaattcaactgtgctttcct

SEQ ID NO: 1581 - DNA, 19 bp, Artificial Sequence
  Primer
gctgcaactactcatgcct

SEQ ID NO: 1582 - DNA, 22 bp, Artificial Sequence
  Primer
tgctgctaacatacacctgaaa

SEQ ID NO: 1583 - DNA, 21 bp, Artificial Sequence
  Primer
ggcattactatcagaccacca

SEQ ID NO: 1584 - DNA, 18 bp, Artificial Sequence
  Primer
aaaagagaagccccagca

SEQ ID NO: 1585 - DNA, 25 bp, Artificial Sequence
  Primer
gcagattatcacaaccactcaaaca

SEQ ID NO: 1586 - DNA, 19 bp, Artificial Sequence
  Primer
gctgcaactactcatgcct

SEQ ID NO: 1587 - DNA, 21 bp, Artificial Sequence
  Primer
gctacacaccttccaaactca

SEQ ID NO: 1588 - DNA, 21 bp, Artificial Sequence
  Primer
gctacacaccttccaaactca

SEQ ID NO: 1589 - DNA, 21 bp, Artificial Sequence
  Primer
gctgccaagaagaacaacata

SEQ ID NO: 1590 - DNA, 21 bp, Artificial Sequence
  Primer
gctacacaccttccaaactca

SEQ ID NO: 1591 - DNA, 21 bp, Artificial Sequence
  Primer
tcggggaccaagacctaatca

SEQ ID NO: 1592 - DNA, 21 bp, Artificial Sequence
  Primer
gctacacaccttccaaactca

SEQ ID NO: 1593 - DNA, 19 bp, Artificial Sequence
  Primer
ctgccaattcaactgtgct

SEQ ID NO: 1594 - DNA, 20 bp, Artificial Sequence
  Primer
caaccaccacagacatcaat

SEQ ID NO: 1595 - DNA, 19 bp, Artificial Sequence
  Primer
aaagagaagccccagcaca

SEQ ID NO: 1596 - DNA, 25 bp, Artificial Sequence
  Primer
ggttccatcatacagtttcctaaca

SEQ ID NO: 1597 - DNA, 22 bp, Artificial Sequence
  Primer
gcttgttcttcacttactgtct

SEQ ID NO: 1598 - DNA, 21 bp, Artificial Sequence
  Primer
ctgcaatcaacagacctcaaa

SEQ ID NO: 1599 - DNA, 20 bp, Artificial Sequence
  Primer
ctgcaatcaacagacctcaa

SEQ ID NO: 1600 - DNA, 21 bp, Artificial Sequence
  Primer
gacgcatacaaaacattccca

SEQ ID NO: 1601 - DNA, 21 bp, Artificial Sequence
  Primer
gcatacaaaacattcccacca

SEQ ID NO: 1602 - DNA, 19 bp, Artificial Sequence
  Primer
cccaggaaaagccaaccaa

SEQ ID NO: 1603 - DNA, 20 bp, Artificial Sequence
  Primer
gaaaacatgacgcccagaga

SEQ ID NO: 1604 - DNA, 19 bp, Artificial Sequence
  Primer
gcagaaacgctcaaagcca

SEQ ID NO: 1605 - DNA, 18 bp, Artificial Sequence
  Primer
cagaaacgctcaaagcca

SEQ ID NO: 1606 - DNA, 20 bp, Artificial Sequence
  Primer
acaaaacattcccaccaaca

SEQ ID NO: 1607 - DNA, 19 bp, Artificial Sequence
  Primer
tgcaactactcatgcctct

SEQ ID NO: 1608 - DNA, 24 bp, Artificial Sequence
  Primer
gcatacaaaacattcccaccaaca

SEQ ID NO: 1609 - DNA, 19 bp, Artificial Sequence
  Primer
cccaggaaaagccaaccaa

SEQ ID NO: 1610 - DNA, 20 bp, Artificial Sequence
  Primer
aaccagaacctacacctgaa

SEQ ID NO: 1611 - DNA, 20 bp, Artificial Sequence
  Primer
gaggacaaccaatcaccaac

SEQ ID NO: 1612 - DNA, 18 bp, Artificial Sequence
  Primer
gcagcagaaacgctcaaa

SEQ ID NO: 1613 - DNA, 18 bp, Artificial Sequence
  Primer
tcaaagggaccagcacaa

SEQ ID NO: 1614 - DNA, 19 bp, Artificial Sequence
  Primer
tcaaagggaccagcacaag

SEQ ID NO: 1615 - DNA, 19 bp, Artificial Sequence
  Primer
ttgactacagcagccaaac

SEQ ID NO: 1616 - DNA, 20 bp, Artificial Sequence
  Primer
gctgccaagaagaacaacat

SEQ ID NO: 1617 - DNA, 21 bp, Artificial Sequence
  Primer
gagaaccaaaaacaaatcgcc

SEQ ID NO: 1618 - DNA, 20 bp, Artificial Sequence
  Primer
ccaaaaacaaatcgccaacc

SEQ ID NO: 1619 - DNA, 20 bp, Artificial Sequence
  Primer
cgcttcacctctactttgac

SEQ ID NO: 1620 - DNA, 21 bp, Artificial Sequence
  Primer
cacattgaccatccaaatcct

SEQ ID NO: 1621 - DNA, 22 bp, Artificial Sequence
  Primer
ccaaaaacaaatcgccaaccaa

SEQ ID NO: 1622 - DNA, 19 bp, Artificial Sequence
  Primer
ctaccaaccaccacagaca

SEQ ID NO: 1623 - DNA, 19 bp, Artificial Sequence
  Primer
gctgcaactactcatgcct

SEQ ID NO: 1624 - DNA, 19 bp, Artificial Sequence
  Primer
gcagacttcaaagccttca

SEQ ID NO: 1625 - DNA, 20 bp, Artificial Sequence
  Primer
ggcagacttcaaagccttca

SEQ ID NO: 1626 - DNA, 22 bp, Artificial Sequence
  Primer
ctgccaagaagaacaacatacc

SEQ ID NO: 1627 - DNA, 22 bp, Artificial Sequence
  Primer
gcagacttcaaagccttcaaac

SEQ ID NO: 1628 - DNA, 21 bp, Artificial Sequence
  Primer
tgacataccaggcataccaaa

SEQ ID NO: 1629 - DNA, 21 bp, Artificial Sequence
  Primer
tgacataccaggcataccaaa

SEQ ID NO: 1630 - DNA, 21 bp, Artificial Sequence
  Primer
caaatacctaccacttgtgct

SEQ ID NO: 1631 - DNA, 18 bp, Artificial Sequence
  Primer
cgacttgcatgatgtgct

SEQ ID NO: 1632 - DNA, 20 bp, Artificial Sequence
  Primer
agaggagccaccaaacacag

SEQ ID NO: 1633 - DNA, 24 bp, Artificial Sequence
  Primer
caccaaaactcaaagaagactacc

SEQ ID NO: 1634 - DNA, 22 bp, Artificial Sequence
  Primer
ccaaatacctaccacttgtgct

SEQ ID NO: 1635 - DNA, 20 bp, Artificial Sequence
  Primer
gataagagctacgagcacca

SEQ ID NO: 1636 - DNA, 18 bp, Artificial Sequence
  Primer
cgacttgcatgatgtgct

SEQ ID NO: 1637 - DNA, 22 bp, Artificial Sequence
  Primer
ccacattgaccatccaaatcct

SEQ ID NO: 1638 - DNA, 25 bp, Artificial Sequence
  Primer
caccaaaactcaaagaagactacca

SEQ ID NO: 1639 - DNA, 21 bp, Artificial Sequence
  Primer
ccacattgaccatccaaatcc

SEQ ID NO: 1640 - DNA, 19 bp, Artificial Sequence
  Primer
aggctggaaatgctacaga

SEQ ID NO: 1641 - DNA, 20 bp, Artificial Sequence
  Primer
accaggcataccaaaggaca

SEQ ID NO: 1642 - DNA, 20 bp, Artificial Sequence
  Primer
gtacatgcgaaaggtcagaa

SEQ ID NO: 1643 - DNA, 18 bp, Artificial Sequence
  Primer
acatccgctctcccattt

SEQ ID NO: 1644 - DNA, 20 bp, Artificial Sequence
  Primer
gttctctaccaaccaccaca

SEQ ID NO: 1645 - DNA, 20 bp, Artificial Sequence
  Primer
aggctggaaatgctacagaa

SEQ ID NO: 1646 - DNA, 19 bp, Artificial Sequence
  Primer
accattgactacagcagcc

SEQ ID NO: 1647 - DNA, 20 bp, Artificial Sequence
  Primer
accaatcaaccctactgacc

SEQ ID NO: 1648 - DNA, 22 bp, Artificial Sequence
  Primer
gctacaaacaatgtctttcgct

SEQ ID NO: 1649 - DNA, 19 bp, Artificial Sequence
  Primer
tatgatgagccgacgacga

SEQ ID NO: 1650 - DNA, 18 bp, Artificial Sequence
  Primer
gctattgttgctgctgct

SEQ ID NO: 1651 - DNA, 19 bp, Artificial Sequence
  Primer
ctgccaattcaactgtgct

SEQ ID NO: 1652 - DNA, 20 bp, Artificial Sequence
  Primer
cctgccaattcaactgtgct

SEQ ID NO: 1653 - DNA, 25 bp, Artificial Sequence
  Primer
ggttccatcatacagtttcctaaca

SEQ ID NO: 1654 - DNA, 21 bp, Artificial Sequence
  Primer
ccaattcaactgtgctttcct

SEQ ID NO: 1655 - DNA, 20 bp, Artificial Sequence
  Primer
tatgatgagccgacgacgac

SEQ ID NO: 1656 - DNA, 20 bp, Artificial Sequence
  Primer
tatgatgagccgacgacgac

SEQ ID NO: 1657 - DNA, 20 bp, Artificial Sequence
  Primer
tatgatgagccgacgacgac

SEQ ID NO: 1658 - DNA, 20 bp, Artificial Sequence
  Primer
tatgatgagccgacgacgac

SEQ ID NO: 1659 - DNA, 20 bp, Artificial Sequence
  Primer
tatgatgagccgacgacgac

SEQ ID NO: 1660 - DNA, 21 bp, Artificial Sequence
  Primer
ccaattcaactgtgctttcct

SEQ ID NO: 1661 - DNA, 20 bp, Artificial Sequence
  Primer
tatgatgagccgacgacgac

SEQ ID NO: 1662 - DNA, 25 bp, Artificial Sequence
  Primer
ggttccatcatacagtttcctaaca

SEQ ID NO: 1663 - DNA, 20 bp, Artificial Sequence
  Primer
actacaaaagagaagcccca

SEQ ID NO: 1664 - DNA, 24 bp, Artificial Sequence
  Primer
ccaattcaactgtgctttccttct

SEQ ID NO: 1665 - DNA, 22 bp, Artificial Sequence
  Primer
atgatgagccgacgacgactac

SEQ ID NO: 1666 - DNA, 22 bp, Artificial Sequence
  Primer
atgatgagccgacgacgactac

SEQ ID NO: 1667 - DNA, 22 bp, Artificial Sequence
  Primer
atgatgagccgacgacgactac

SEQ ID NO: 1668 - DNA, 22 bp, Artificial Sequence
  Primer
atgatgagccgacgacgactac

SEQ ID NO: 1669 - DNA, 22 bp, Artificial Sequence
  Primer
atgatgagccgacgacgactac

SEQ ID NO: 1670 - DNA, 21 bp, Artificial Sequence
  Primer
tcctacacaggcacctacaca

SEQ ID NO: 1671 - DNA, 20 bp, Artificial Sequence
  Primer
tgccaacctattctgttgct

SEQ ID NO: 1672 - DNA, 20 bp, Artificial Sequence
  Primer
aaccagaacctacacctgaa

SEQ ID NO: 1673 - DNA, 20 bp, Artificial Sequence
  Primer
actacaaaagagaagcccca

SEQ ID NO: 1674 - DNA, 19 bp, Artificial Sequence
  Primer
accattgactacagcagcc

SEQ ID NO: 1675 - DNA, 22 bp, Artificial Sequence
  Primer
ggactacaaaagagaagcccca

SEQ ID NO: 1676 - DNA, 19 bp, Artificial Sequence
  Primer
accattgactacagcagcc

SEQ ID NO: 1677 - DNA, 19 bp, Artificial Sequence
  Primer
tccgctctcccattttgtc

SEQ ID NO: 1678 - DNA, 21 bp, Artificial Sequence
  Primer
acaactcctggaacaatggaa

SEQ ID NO: 1679 - DNA, 18 bp, Artificial Sequence
  Primer
accaaccaccacagacat

SEQ ID NO: 1680 - DNA, 21 bp, Artificial Sequence
  Primer
acaactcctggaacaatggaa

SEQ ID NO: 1681 - DNA, 21 bp, Artificial Sequence
  Primer
aggacaagagggcaaaagtaa

SEQ ID NO: 1682 - DNA, 21 bp, Artificial Sequence
  Primer
acaactcctggaacaatggaa

SEQ ID NO: 1683 - DNA, 18 bp, Artificial Sequence
  Primer
accaaccaccacagacat

SEQ ID NO: 1684 - DNA, 19 bp, Artificial Sequence
  Primer
tgaggacaagagggcaaaa

SEQ ID NO: 1685 - DNA, 22 bp, Artificial Sequence
  Primer
ctacacaccttccaaactcatt

SEQ ID NO: 1686 - DNA, 21 bp, Artificial Sequence
  Primer
tgtagacatggtacatgcgaa

SEQ ID NO: 1687 - DNA, 21 bp, Artificial Sequence
  Primer
caccacagacatcaatcactt

SEQ ID NO: 1688 - DNA, 21 bp, Artificial Sequence
  Primer
acaactcctggaacaatggaa

SEQ ID NO: 1689 - DNA, 21 bp, Artificial Sequence
  Primer
tgtagacatggtacatgcgaa

SEQ ID NO: 1690 - DNA, 20 bp, Artificial Sequence
  Primer
ggtcattcaacccagaaaca

SEQ ID NO: 1691 - DNA, 21 bp, Artificial Sequence
  Primer
tgtagacatggtacatgcgaa

SEQ ID NO: 1692 - DNA, 21 bp, Artificial Sequence
  Primer
acttctaaccctaagacaccc

SEQ ID NO: 1693 - DNA, 21 bp, Artificial Sequence
  Primer
tctctaccaaccaccacagac

SEQ ID NO: 1694 - DNA, 19 bp, Artificial Sequence
  Primer
accattgactacagcagcc

SEQ ID NO: 1695 - DNA, 24 bp, Artificial Sequence
  Primer
ggtcattcaacccagaaacaaaca

SEQ ID NO: 1696 - DNA, 22 bp, Artificial Sequence
  Primer
gctacacaccttccaaactcat

SEQ ID NO: 1697 - DNA, 21 bp, Artificial Sequence
  Primer
gtagacatggtacatgcgaaa

SEQ ID NO: 1698 - DNA, 21 bp, Artificial Sequence
  Primer
gtagacatggtacatgcgaaa

SEQ ID NO: 1699 - DNA, 24 bp, Artificial Sequence
  Primer
tgatacttctaaccctaagacacc

SEQ ID NO: 1700 - DNA, 20 bp, Artificial Sequence
  Primer
gcccatcaggaacatacgag

SEQ ID NO: 1701 - DNA, 20 bp, Artificial Sequence
  Primer
gcccatcaggaacatacgag

SEQ ID NO: 1702 - DNA, 20 bp, Artificial Sequence
  Primer
gcccatcaggaacatacgag

SEQ ID NO: 1703 - DNA, 19 bp, Artificial Sequence
  Primer
tctaccaaccaccacagac

SEQ ID NO: 1704 - DNA, 19 bp, Artificial Sequence
  Primer
tctaccaaccaccacagac

SEQ ID NO: 1705 - DNA, 19 bp, Artificial Sequence
  Primer
aagagaagccccagcacat

SEQ ID NO: 1706 - DNA, 20 bp, Artificial Sequence
  Primer
gcccatcaggaacatacgag

SEQ ID NO: 1707 - DNA, 20 bp, Artificial Sequence
  Primer
gctcattcgcaaatccaacc

SEQ ID NO: 1708 - DNA, 19 bp, Artificial Sequence
  Primer
gcaagtcacataagcctcc

SEQ ID NO: 1709 - DNA, 20 bp, Artificial Sequence
  Primer
gcaagtcacataagcctccc

SEQ ID NO: 1710 - DNA, 24 bp, Artificial Sequence
  Primer
gataagagctacgagcaccagaca

SEQ ID NO: 1711 - DNA, 20 bp, Artificial Sequence
  Primer
gcaagtcacataagcctccc

SEQ ID NO: 1712 - DNA, 19 bp, Artificial Sequence
  Primer
tcaggaacatacgagggca

SEQ ID NO: 1713 - DNA, 24 bp, Artificial Sequence
  Primer
gataagagctacgagcaccagaca

SEQ ID NO: 1714 - DNA, 22 bp, Artificial Sequence
  Primer
ctctgtctacactgttgaatcc

SEQ ID NO: 1715 - DNA, 19 bp, Artificial Sequence
  Primer
agccagaaccagaacctac

SEQ ID NO: 1716 - DNA, 20 bp, Artificial Sequence
  Primer
gctacacaccttccaaactc

SEQ ID NO: 1717 - DNA, 20 bp, Artificial Sequence
  Primer
gctacacaccttccaaactc

SEQ ID NO: 1718 - DNA, 19 bp, Artificial Sequence
  Primer
gtgacttgtgctgcctact

SEQ ID NO: 1719 - DNA, 21 bp, Artificial Sequence
  Primer
gctacacaccttccaaactca

SEQ ID NO: 1720 - DNA, 21 bp, Artificial Sequence
  Primer
gctacacaccttccaaactca

SEQ ID NO: 1721 - DNA, 19 bp, Artificial Sequence
  Primer
tctaccaaccaccacagac

SEQ ID NO: 1722 - DNA, 18 bp, Artificial Sequence
  Primer
acatccgctctcccattt

SEQ ID NO: 1723 - DNA, 21 bp, Artificial Sequence
  Primer
gtagacatggtacatgcgaaa

SEQ ID NO: 1724 - DNA, 21 bp, Artificial Sequence
  Primer
gcagagtgtgaggaagaagaa

SEQ ID NO: 1725 - DNA, 18 bp, Artificial Sequence
  Primer
acatccgctctcccattt

SEQ ID NO: 1726 - DNA, 22 bp, Artificial Sequence
  Primer
ctctgtctacactgttgaatcc

SEQ ID NO: 1727 - DNA, 19 bp, Artificial Sequence
  Primer
ttgactacagcagccaaac

SEQ ID NO: 1728 - DNA, 21 bp, Artificial Sequence
  Primer
gcagagtgtgaggaagaagaa

SEQ ID NO: 1729 - DNA, 21 bp, Artificial Sequence
  Primer
gctacacaccttccaaactca

SEQ ID NO: 1730 - DNA, 19 bp, Artificial Sequence
  Primer
caggaacatacgagggcaa

SEQ ID NO: 1731 - DNA, 25 bp, Artificial Sequence
  Primer
gcgtaatgtcatccctactataact

SEQ ID NO: 1732 - DNA, 21 bp, Artificial Sequence
  Primer
gctacacaccttccaaactca

SEQ ID NO: 1733 - DNA, 19 bp, Artificial Sequence
  Primer
tgaggacaagagggcaaaa

SEQ ID NO: 1734 - DNA, 22 bp, Artificial Sequence
  Primer
gcagagtgtgaggaagaagaaa

SEQ ID NO: 1735 - DNA, 21 bp, Artificial Sequence
  Primer
gctacacaccttccaaactca

SEQ ID NO: 1736 - DNA, 22 bp, Artificial Sequence
  Primer
gcagagtgtgaggaagaagaaa

SEQ ID NO: 1737 - DNA, 22 bp, Artificial Sequence
  Primer
gctacaaacaatgtctttcgct

SEQ ID NO: 1738 - DNA, 20 bp, Artificial Sequence
  Primer
actctacactccaaggacca

SEQ ID NO: 1739 - DNA, 19 bp, Artificial Sequence
  Primer
gagccaccaaacacagaag

SEQ ID NO: 1740 - DNA, 19 bp, Artificial Sequence
  Primer
gagccaccaaacacagaag

SEQ ID NO: 1741 - DNA, 20 bp, Artificial Sequence
  Primer
gcaattcaccatttcaccct

SEQ ID NO: 1742 - DNA, 20 bp, Artificial Sequence
  Primer
gcaattcaccatttcaccct

SEQ ID NO: 1743 - DNA, 21 bp, Artificial Sequence
  Primer
caattcaccatttcaccctct

SEQ ID NO: 1744 - DNA, 21 bp, Artificial Sequence
  Primer
caattcaccatttcaccctct

SEQ ID NO: 1745 - DNA, 23 bp, Artificial Sequence
  Primer
cacacaaactactgaaacagcac

SEQ ID NO: 1746 - DNA, 23 bp, Artificial Sequence
  Primer
cacaaactactgaaacagcacac

SEQ ID NO: 1747 - DNA, 20 bp, Artificial Sequence
  Primer
gtcttcatcctacacaggca

SEQ ID NO: 1748 - DNA, 20 bp, Artificial Sequence
  Primer
gtcttcatcctacacaggca

SEQ ID NO: 1749 - DNA, 20 bp, Artificial Sequence
  Primer
cacacactttgcttttgctt

SEQ ID NO: 1750 - DNA, 20 bp, Artificial Sequence
  Primer
cacacactttgcttttgctt

SEQ ID NO: 1751 - DNA, 20 bp, Artificial Sequence
  Primer
gtcttcatcctacacaggca

SEQ ID NO: 1752 - DNA, 19 bp, Artificial Sequence
  Primer
ctgaggacaagagggcaaa

SEQ ID NO: 1753 - DNA, 21 bp, Artificial Sequence
  Primer
gctgatgtgccaacctattct

SEQ ID NO: 1754 - DNA, 19 bp, Artificial Sequence
  Primer
agccagaaccagaacctac

SEQ ID NO: 1755 - DNA, 19 bp, Artificial Sequence
  Primer
agccagaaccagaacctac

SEQ ID NO: 1756 - DNA, 19 bp, Artificial Sequence
  Primer
agccagaaccagaacctac

SEQ ID NO: 1757 - DNA, 22 bp, Artificial Sequence
  Primer
ctacccaggaaaagccaaccaa

SEQ ID NO: 1758 - DNA, 20 bp, Artificial Sequence
  Primer
gtacatgcgaaaggtcagaa

SEQ ID NO: 1759 - DNA, 22 bp, Artificial Sequence
  Primer
tgacaataaccagaatggagga

SEQ ID NO: 1760 - DNA, 20 bp, Artificial Sequence
  Primer
gtacatgcgaaaggtcagaa

SEQ ID NO: 1761 - DNA, 19 bp, Artificial Sequence
  Primer
tccgctctcccattttgtc

SEQ ID NO: 1762 - DNA, 20 bp, Artificial Sequence
  Primer
gtacatgcgaaaggtcagaa

SEQ ID NO: 1763 - DNA, 19 bp, Artificial Sequence
  Primer
gaggacaagagggcaaaag

SEQ ID NO: 1764 - DNA, 20 bp, Artificial Sequence
  Primer
gccagaaccagaacctacac

SEQ ID NO: 1765 - DNA, 25 bp, Artificial Sequence
  Primer
gcgtaatgtcatccctactataact

SEQ ID NO: 1766 - DNA, 20 bp, Artificial Sequence
  Primer
gccagaaccagaacctacac

SEQ ID NO: 1767 - DNA, 19 bp, Artificial Sequence
  Primer
ctgaggacaagagggcaaa

SEQ ID NO: 1768 - DNA, 20 bp, Artificial Sequence
  Primer
gccagaaccagaacctacac

SEQ ID NO: 1769 - DNA, 19 bp, Artificial Sequence
  Primer
ctgaggacaagagggcaaa

SEQ ID NO: 1770 - DNA, 20 bp, Artificial Sequence
  Primer
tggtgacggcaaaatgaaag

SEQ ID NO: 1771 - DNA, 20 bp, Artificial Sequence
  Primer
tggtgacggcaaaatgaaag

SEQ ID NO: 1772 - DNA, 20 bp, Artificial Sequence
  Primer
caaccaccacagacatcaat

SEQ ID NO: 1773 - DNA, 19 bp, Artificial Sequence
  Primer
gaggacaagagggcaaaag

SEQ ID NO: 1774 - DNA, 21 bp, Artificial Sequence
  Primer
atgctgctaacatacacctga

SEQ ID NO: 1775 - DNA, 20 bp, Artificial Sequence
  Primer
attgttgctgctgctacttt

SEQ ID NO: 1776 - DNA, 21 bp, Artificial Sequence
  Primer
ggtgacggcaaaatgaaagag

SEQ ID NO: 1777 - DNA, 21 bp, Artificial Sequence
  Primer
ggtgacggcaaaatgaaagag

SEQ ID NO: 1778 - DNA, 20 bp, Artificial Sequence
  Primer
gaaccagaacctacacctga

SEQ ID NO: 1779 - DNA, 19 bp, Artificial Sequence
  Primer
gaggacaagagggcaaaag

SEQ ID NO: 1780 - DNA, 20 bp, Artificial Sequence
  Primer
gaaccagaacctacacctga

SEQ ID NO: 1781 - DNA, 21 bp, Artificial Sequence
  Primer
agaaccagaacctacacctga

SEQ ID NO: 1782 - DNA, 20 bp, Artificial Sequence
  Primer
aaccagaacctacacctgaa

SEQ ID NO: 1783 - DNA, 20 bp, Artificial Sequence
  Primer
caaccaccacagacatcaat

SEQ ID NO: 1784 - DNA, 21 bp, Artificial Sequence
  Primer
gcagattatcacaaccactca

SEQ ID NO: 1785 - DNA, 20 bp, Artificial Sequence
  Primer
gttctctaccaaccaccaca

SEQ ID NO: 1786 - DNA, 19 bp, Artificial Sequence
  Primer
agaggagccaccaaacaca

SEQ ID NO: 1787 - DNA, 19 bp, Artificial Sequence
  Primer
tgcaactactcatgcctct

SEQ ID NO: 1788 - DNA, 22 bp, Artificial Sequence
  Primer
tcatcctacacaggcacctaca

SEQ ID NO: 1789 - DNA, 20 bp, Artificial Sequence
  Primer
ggaggacaaccaatcaccaa

SEQ ID NO: 1790 - DNA, 20 bp, Artificial Sequence
  Primer
ccgtgaccatgagcatgaaa

SEQ ID NO: 1791 - DNA, 19 bp, Artificial Sequence
  Primer
cgtgaccatgagcatgaaa

SEQ ID NO: 1792 - DNA, 20 bp, Artificial Sequence
  Primer
gcatctaaaaagcctcgcca

SEQ ID NO: 1793 - DNA, 19 bp, Artificial Sequence
  Primer
cgtgaccatgagcatgaaa

SEQ ID NO: 1794 - DNA, 21 bp, Artificial Sequence
  Primer
ggcatctaaaaagcctcgcca

SEQ ID NO: 1795 - DNA, 24 bp, Artificial Sequence
  Primer
ccactcaacatcataccattgact

SEQ ID NO: 1796 - DNA, 21 bp, Artificial Sequence
  Primer
gcatctaaaaagcctcgccaa

SEQ ID NO: 1797 - DNA, 22 bp, Artificial Sequence
  Primer
ccacaacactggaagaaactaa

SEQ ID NO: 1798 - DNA, 21 bp, Artificial Sequence
  Primer
gacactattcagcgagtttca

SEQ ID NO: 1799 - DNA, 21 bp, Artificial Sequence
  Primer
catctaaaaagcctcgccaaa

SEQ ID NO: 1800 - DNA, 21 bp, Artificial Sequence
  Primer
tgaaaacatgacgcccagaga

SEQ ID NO: 1801 - DNA, 20 bp, Artificial Sequence
  Primer
tgacatcgtcaagggtcaaa

SEQ ID NO: 1802 - DNA, 18 bp, Artificial Sequence
  Primer
tatgccgcttatgccact

SEQ ID NO: 1803 - DNA, 19 bp, Artificial Sequence
  Primer
ccgtgaccatgagcatgaa

SEQ ID NO: 1804 - DNA, 22 bp, Artificial Sequence
  Primer
catctaaaaagcctcgccaaaa

SEQ ID NO: 1805 - DNA, 19 bp, Artificial Sequence
  Primer
ccgtgaccatgagcatgaa

SEQ ID NO: 1806 - DNA, 18 bp, Artificial Sequence
  Primer
tatgccgcttatgccact

SEQ ID NO: 1807 - DNA, 19 bp, Artificial Sequence
  Primer
ccgtgaccatgagcatgaa

SEQ ID NO: 1808 - DNA, 19 bp, Artificial Sequence
  Primer
tgttgctgctgctactttg

SEQ ID NO: 1809 - DNA, 21 bp, Artificial Sequence
  Primer
gcacctacgcagtataaacaa

SEQ ID NO: 1810 - DNA, 19 bp, Artificial Sequence
  Primer
actacagcagccaaactca

SEQ ID NO: 1811 - DNA, 19 bp, Artificial Sequence
  Primer
gcaagtcacataagcctcc

SEQ ID NO: 1812 - DNA, 18 bp, Artificial Sequence
  Primer
accaaccaccacagacat

SEQ ID NO: 1813 - DNA, 21 bp, Artificial Sequence
  Primer
aggacaagagggcaaaagtaa

SEQ ID NO: 1814 - DNA, 22 bp, Artificial Sequence
  Primer
accagaacctacacctgaagaa

SEQ ID NO: 1815 - DNA, 20 bp, Artificial Sequence
  Primer
ctattgttgctgctgctact

SEQ ID NO: 1816 - DNA, 21 bp, Artificial Sequence
  Primer
ccagaacctacacctgaagaa

SEQ ID NO: 1817 - DNA, 19 bp, Artificial Sequence
  Primer
acatccgctctcccatttt

SEQ ID NO: 1818 - DNA, 21 bp, Artificial Sequence
  Primer
ggaccaagacctaatcagaca

SEQ ID NO: 1819 - DNA, 19 bp, Artificial Sequence
  Primer
tgttgctgctgctactttg

SEQ ID NO: 1820 - DNA, 20 bp, Artificial Sequence
  Primer
ggcagacttcaaagccttca

SEQ ID NO: 1821 - DNA, 22 bp, Artificial Sequence
  Primer
ggaccaagacctaatcagacaa

SEQ ID NO: 1822 - DNA, 20 bp, Artificial Sequence
  Primer
acaagaggagccaccaaaca

SEQ ID NO: 1823 - DNA, 21 bp, Artificial Sequence
  Primer
ccagaacctacacctgaagaa

SEQ ID NO: 1824 - DNA, 21 bp, Artificial Sequence
  Primer
ccagaacctacacctgaagaa

SEQ ID NO: 1825 - DNA, 23 bp, Artificial Sequence
  Primer
ccaagacctaatcagacaaggaa

SEQ ID NO: 1826 - DNA, 22 bp, Artificial Sequence
  Primer
ccaaaaacaaatcgccaaccaa

SEQ ID NO: 1827 - DNA, 21 bp, Artificial Sequence
  Primer
accagaacctacacctgaaga

SEQ ID NO: 1828 - DNA, 21 bp, Artificial Sequence
  Primer
ccaaccaccacagacatcaat

SEQ ID NO: 1829 - DNA, 20 bp, Artificial Sequence
  Primer
tgctacacaccttccaaact

SEQ ID NO: 1830 - DNA, 20 bp, Artificial Sequence
  Primer
tcaagaacggtgaactcgaa

SEQ ID NO: 1831 - DNA, 21 bp, Artificial Sequence
  Primer
ctattgttgctgctgctactt

SEQ ID NO: 1832 - DNA, 20 bp, Artificial Sequence
  Primer
ccagaacctacacctgaaga

SEQ ID NO: 1833 - DNA, 20 bp, Artificial Sequence
  Primer
ccagaacctacacctgaaga

SEQ ID NO: 1834 - DNA, 21 bp, Artificial Sequence
  Primer
tgaccctctaaagccaactaa

SEQ ID NO: 1835 - DNA, 19 bp, Artificial Sequence
  Primer
ggcaagccgaaggaacaaa

SEQ ID NO: 1836 - DNA, 21 bp, Artificial Sequence
  Primer
gaaccagaacctacacctgaa

SEQ ID NO: 1837 - DNA, 20 bp, Artificial Sequence
  Primer
aaccagaacctacacctgaa

SEQ ID NO: 1838 - DNA, 19 bp, Artificial Sequence
  Primer
gtcttcatcgctcaaagca

SEQ ID NO: 1839 - DNA, 21 bp, Artificial Sequence
  Primer
acaaaacattcccaccaacag

SEQ ID NO: 1840 - DNA, 18 bp, Artificial Sequence
  Primer
accaaccaccacagacat

SEQ ID NO: 1841 - DNA, 20 bp, Artificial Sequence
  Primer
gacttgtgctgcctactact

SEQ ID NO: 1842 - DNA, 18 bp, Artificial Sequence
  Primer
agcaacgataccgctaca

SEQ ID NO: 1843 - DNA, 21 bp, Artificial Sequence
  Primer
gcagattatcacaaccactca

SEQ ID NO: 1844 - DNA, 18 bp, Artificial Sequence
  Primer
accaaccaccacagacat

SEQ ID NO: 1845 - DNA, 20 bp, Artificial Sequence
  Primer
ccaccacagacatcaatcac

SEQ ID NO: 1846 - DNA, 21 bp, Artificial Sequence
  Primer
ccacattgaccatccaaatcc

SEQ ID NO: 1847 - DNA, 19 bp, Artificial Sequence
  Primer
acatccgctctcccatttt

SEQ ID NO: 1848 - DNA, 19 bp, Artificial Sequence
  Primer
acatccgctctcccatttt

SEQ ID NO: 1849 - DNA, 20 bp, Artificial Sequence
  Primer
tgacataccaggcataccaa

SEQ ID NO: 1850 - DNA, 20 bp, Artificial Sequence
  Primer
tgacataccaggcataccaa

SEQ ID NO: 1851 - DNA, 23 bp, Artificial Sequence
  Primer
ccaacagagcctaaaaaggacaa

SEQ ID NO: 1852 - DNA, 19 bp, Artificial Sequence
  Primer
agcaacgataccgctacaa

SEQ ID NO: 1853 - DNA, 19 bp, Artificial Sequence
  Primer
agcaacgataccgctacaa

SEQ ID NO: 1854 - DNA, 24 bp, Artificial Sequence
  Primer
ccaacagagcctaaaaaggacaaa

SEQ ID NO: 1855 - DNA, 20 bp, Artificial Sequence
  Primer
cagcaacgataccgctacaa

SEQ ID NO: 1856 - DNA, 20 bp, Artificial Sequence
  Primer
agaggagccaccaaacacag

SEQ ID NO: 1857 - DNA, 25 bp, Artificial Sequence
  Primer
ccaacagagcctaaaaaggacaaaa

SEQ ID NO: 1858 - DNA, 20 bp, Artificial Sequence
  Primer
gataagagctacgagcacca

SEQ ID NO: 1859 - DNA, 19 bp, Artificial Sequence
  Primer
gctgcaactactcatgcct

SEQ ID NO: 1860 - DNA, 25 bp, Artificial Sequence
  Primer
cgtcagcgtctaactaaatacacaa

SEQ ID NO: 1861 - DNA, 20 bp, Artificial Sequence
  Primer
gataagagctacgagcacca

SEQ ID NO: 1862 - DNA, 20 bp, Artificial Sequence
  Primer
actgtgctgagagcaatcaa

SEQ ID NO: 1863 - DNA, 18 bp, Artificial Sequence
  Primer
acaagaggagccaccaaa

SEQ ID NO: 1864 - DNA, 21 bp, Artificial Sequence
  Primer
cacattgaccatccaaatcct

SEQ ID NO: 1865 - DNA, 18 bp, Artificial Sequence
  Primer
aagaggagccaccaaaca

SEQ ID NO: 1866 - DNA, 21 bp, Artificial Sequence
  Primer
ggtacatgcgaaaggtcagaa

SEQ ID NO: 1867 - DNA, 20 bp, Artificial Sequence
  Primer
ccagaaccagaacctacacc

SEQ ID NO: 1868 - DNA, 20 bp, Artificial Sequence
  Primer
gaggacaaccaatcaccaac

SEQ ID NO: 1869 - DNA, 20 bp, Artificial Sequence
  Primer
tcaagaacggtgaactcgaa

SEQ ID NO: 1870 - DNA, 20 bp, Artificial Sequence
  Primer
ttgctacacaccttccaaac

SEQ ID NO: 1871 - DNA, 18 bp, Artificial Sequence
  Primer
aaacaagaggagccacca

SEQ ID NO: 1872 - DNA, 20 bp, Artificial Sequence
  Primer
ccagaaccagaacctacacc

SEQ ID NO: 1873 - DNA, 20 bp, Artificial Sequence
  Primer
ccagaaccagaacctacacc

SEQ ID NO: 1874 - DNA, 20 bp, Artificial Sequence
  Primer
ccagaaccagaacctacacc

SEQ ID NO: 1875 - DNA, 19 bp, Artificial Sequence
  Primer
gcaagggactttaccgtca

SEQ ID NO: 1876 - DNA, 20 bp, Artificial Sequence
  Primer
tgacataccaggcataccaa

SEQ ID NO: 1877 - DNA, 25 bp, Artificial Sequence
  Primer
cgtcagcgtctaactaaatacacaa

SEQ ID NO: 1878 - DNA, 18 bp, Artificial Sequence
  Primer
aaacaagaggagccacca

SEQ ID NO: 1879 - DNA, 20 bp, Artificial Sequence
  Primer
gaggacaaccaatcaccaac

SEQ ID NO: 1880 - DNA, 18 bp, Artificial Sequence
  Primer
acaagaggagccaccaaa

SEQ ID NO: 1881 - DNA, 22 bp, Artificial Sequence
  Primer
caagtatgtccgcaatctacaa

SEQ ID NO: 1882 - DNA, 19 bp, Artificial Sequence
  Primer
tgaggacaagagggcaaaa

SEQ ID NO: 1883 - DNA, 19 bp, Artificial Sequence
  Primer
tgaggacaagagggcaaaa

SEQ ID NO: 1884 - DNA, 21 bp, Artificial Sequence
  Primer
tgacataccaggcataccaaa

SEQ ID NO: 1885 - DNA, 21 bp, Artificial Sequence
  Primer
gacataccaggcataccaaag

SEQ ID NO: 1886 - DNA, 20 bp, Artificial Sequence
  Primer
gaggacaaccaatcaccaac

SEQ ID NO: 1887 - DNA, 19 bp, Artificial Sequence
  Primer
accaggcataccaaaggac

SEQ ID NO: 1888 - DNA, 19 bp, Artificial Sequence
  Primer
accaggcataccaaaggac

SEQ ID NO: 1889 - DNA, 19 bp, Artificial Sequence
  Primer
accaggcataccaaaggac

SEQ ID NO: 1890 - DNA, 19 bp, Artificial Sequence
  Primer
accaggcataccaaaggac

SEQ ID NO: 1891 - DNA, 22 bp, Artificial Sequence
  Primer
cataccaggcataccaaaggac

SEQ ID NO: 1892 - DNA, 23 bp, Artificial Sequence
  Primer
acataccaggcataccaaaggac

SEQ ID NO: 1893 - DNA, 19 bp, Artificial Sequence
  Primer
agaggagccaccaaacaca

SEQ ID NO: 1894 - DNA, 20 bp, Artificial Sequence
  Primer
gcagagtgtgaggaagaaga

SEQ ID NO: 1895 - DNA, 20 bp, Artificial Sequence
  Primer
gcagagtgtgaggaagaaga

SEQ ID NO: 1896 - DNA, 22 bp, Artificial Sequence
  Primer
caagtatgtccgcaatctacaa

SEQ ID NO: 1897 - DNA, 19 bp, Artificial Sequence
  Primer
ccaggcataccaaaggaca

SEQ ID NO: 1898 - DNA, 20 bp, Artificial Sequence
  Primer
ggaggacaaccaatcaccaa

SEQ ID NO: 1899 - DNA, 21 bp, Artificial Sequence
  Primer
gcagagtgtgaggaagaagaa

SEQ ID NO: 1900 - DNA, 20 bp, Artificial Sequence
  Primer
accaggcataccaaaggaca

SEQ ID NO: 1901 - DNA, 20 bp, Artificial Sequence
  Primer
gcccatcaggaacatacgag

SEQ ID NO: 1902 - DNA, 19 bp, Artificial Sequence
  Primer
ttgagccagaaccagaacc

SEQ ID NO: 1903 - DNA, 19 bp, Artificial Sequence
  Primer
ttgagccagaaccagaacc

SEQ ID NO: 1904 - DNA, 23 bp, Artificial Sequence
  Primer
cataccaggcataccaaaggaca

SEQ ID NO: 1905 - DNA, 21 bp, Artificial Sequence
  Primer
gcagagtgtgaggaagaagaa

SEQ ID NO: 1906 - DNA, 19 bp, Artificial Sequence
  Primer
gtgtgacaaacgtgcaact

SEQ ID NO: 1907 - DNA, 21 bp, Artificial Sequence
  Primer
cagatacttatgcctgctgga

SEQ ID NO: 1908 - DNA, 20 bp, Artificial Sequence
  Primer
gattgagccagaaccagaac

SEQ ID NO: 1909 - DNA, 20 bp, Artificial Sequence
  Primer
ggctttacgggtaaccttca

SEQ ID NO: 1910 - DNA, 20 bp, Artificial Sequence
  Primer
gattgagccagaaccagaac

SEQ ID NO: 1911 - DNA, 19 bp, Artificial Sequence
  Primer
tcaggaacatacgagggca

SEQ ID NO: 1912 - DNA, 19 bp, Artificial Sequence
  Primer
tcaggaacatacgagggca

SEQ ID NO: 1913 - DNA, 21 bp, Artificial Sequence
  Primer
gcagagtgtgaggaagaagaa

SEQ ID NO: 1914 - DNA, 21 bp, Artificial Sequence
  Primer
gggtaaccttcagagtaacca

SEQ ID NO: 1915 - DNA, 20 bp, Artificial Sequence
  Primer
gccacaagagcactatgtga

SEQ ID NO: 1916 - DNA, 19 bp, Artificial Sequence
  Primer
tgaggacaagagggcaaaa

SEQ ID NO: 1917 - DNA, 19 bp, Artificial Sequence
  Primer
tccgctctcccattttgtc

SEQ ID NO: 1918 - DNA, 22 bp, Artificial Sequence
  Primer
caagtatgtccgcaatctacaa

SEQ ID NO: 1919 - DNA, 20 bp, Artificial Sequence
  Primer
gataagagctacgagcacca

SEQ ID NO: 1920 - DNA, 20 bp, Artificial Sequence
  Primer
gagattgagccagaaccaga

SEQ ID NO: 1921 - DNA, 18 bp, Artificial Sequence
  Primer
aagaggagccaccaaaca

SEQ ID NO: 1922 - DNA, 20 bp, Artificial Sequence
  Primer
gactacaaaagagaagcccc

SEQ ID NO: 1923 - DNA, 20 bp, Artificial Sequence
  Primer
ggaggacaaccaatcaccaa

SEQ ID NO: 1924 - DNA, 19 bp, Artificial Sequence
  Primer
gcaagtggaggacaaccaa

SEQ ID NO: 1925 - DNA, 19 bp, Artificial Sequence
  Primer
ctgaggacaagagggcaaa

SEQ ID NO: 1926 - DNA, 20 bp, Artificial Sequence
  Primer
actacaaaagagaagcccca

SEQ ID NO: 1927 - DNA, 21 bp, Artificial Sequence
  Primer
cacattgaccatccaaatcct

SEQ ID NO: 1928 - DNA, 22 bp, Artificial Sequence
  Primer
ccaccaaacacagaagattcca

SEQ ID NO: 1929 - DNA, 21 bp, Artificial Sequence
  Primer
gctacacaccttccaaactca

SEQ ID NO: 1930 - DNA, 20 bp, Artificial Sequence
  Primer
gctgtgtgtttgcctatgtt

SEQ ID NO: 1931 - DNA, 19 bp, Artificial Sequence
  Primer
ctgaggacaagagggcaaa

SEQ ID NO: 1932 - DNA, 22 bp, Artificial Sequence
  Primer
gcagagtgtgaggaagaagaaa

SEQ ID NO: 1933 - DNA, 21 bp, Artificial Sequence
  Primer
ggcattactatcagaccacca

SEQ ID NO: 1934 - DNA, 21 bp, Artificial Sequence
  Primer
gctacacaccttccaaactca

SEQ ID NO: 1935 - DNA, 21 bp, Artificial Sequence
  Primer
gctacacaccttccaaactca

SEQ ID NO: 1936 - DNA, 21 bp, Artificial Sequence
  Primer
gctacacaccttccaaactca

SEQ ID NO: 1937 - DNA, 22 bp, Artificial Sequence
  Primer
gcagagtgtgaggaagaagaaa

SEQ ID NO: 1938 - DNA, 21 bp, Artificial Sequence
  Primer
ccacattgaccatccaaatcc

SEQ ID NO: 1939 - DNA, 21 bp, Artificial Sequence
  Primer
ggcattactatcagaccacca

SEQ ID NO: 1940 - DNA, 24 bp, Artificial Sequence
  Primer
cgtcagcgtctaactaaatacaca

SEQ ID NO: 1941 - DNA, 19 bp, Artificial Sequence
  Primer
gtgctgccaagaagaacaa

SEQ ID NO: 1942 - DNA, 22 bp, Artificial Sequence
  Primer
gcagagtgtgaggaagaagaaa

SEQ ID NO: 1943 - DNA, 19 bp, Artificial Sequence
  Primer
gcactctttccgaacaact

SEQ ID NO: 1944 - DNA, 18 bp, Artificial Sequence
  Primer
tcaaaggggaatgcccaa

SEQ ID NO: 1945 - DNA, 20 bp, Artificial Sequence
  Primer
gagggcaattcaccatttca

SEQ ID NO: 1946 - DNA, 20 bp, Artificial Sequence
  Primer
gagggcaattcaccatttca

SEQ ID NO: 1947 - DNA, 22 bp, Artificial Sequence
  Primer
gctacaaacaatgtctttcgct

SEQ ID NO: 1948 - DNA, 18 bp, Artificial Sequence
  Primer
tcaaaggggaatgcccaa

SEQ ID NO: 1949 - DNA, 19 bp, Artificial Sequence
  Primer
gcaagggactttaccgtca

SEQ ID NO: 1950 - DNA, 19 bp, Artificial Sequence
  Primer
agaggagccaccaaacaca

SEQ ID NO: 1951 - DNA, 22 bp, Artificial Sequence
  Primer
caagtatgtccgcaatctacaa

SEQ ID NO: 1952 - DNA, 20 bp, Artificial Sequence
  Primer
actgtgctgagagcaatcaa

SEQ ID NO: 1953 - DNA, 19 bp, Artificial Sequence
  Primer
aaagagaagccccagcaca

SEQ ID NO: 1954 - DNA, 19 bp, Artificial Sequence
  Primer
aacaccttcaaagggacca

SEQ ID NO: 1955 - DNA, 19 bp, Artificial Sequence
  Primer
accttcaaagggaccagca

SEQ ID NO: 1956 - DNA, 21 bp, Artificial Sequence
  Primer
ccacaagagcactatgtgaga

SEQ ID NO: 1957 - DNA, 21 bp, Artificial Sequence
  Primer
ccacaagagcactatgtgaga

SEQ ID NO: 1958 - DNA, 21 bp, Artificial Sequence
  Primer
ccacaagagcactatgtgaga

SEQ ID NO: 1959 - DNA, 20 bp, Artificial Sequence
  Primer
actttgcttttgcttgtgct

SEQ ID NO: 1960 - DNA, 22 bp, Artificial Sequence
  Primer
ccacaagagcactatgtgagaa

SEQ ID NO: 1961 - DNA, 19 bp, Artificial Sequence
  Primer
cctgaccctctaaagccaa

SEQ ID NO: 1962 - DNA, 19 bp, Artificial Sequence
  Primer
cctgaccctctaaagccaa

SEQ ID NO: 1963 - DNA, 22 bp, Artificial Sequence
  Primer
ccacaagagcactatgtgagaa

SEQ ID NO: 1964 - DNA, 22 bp, Artificial Sequence
  Primer
ccacaagagcactatgtgagaa

SEQ ID NO: 1965 - DNA, 21 bp, Artificial Sequence
  Primer
tgaccctctaaagccaactaa

SEQ ID NO: 1966 - DNA, 22 bp, Artificial Sequence
  Primer
ccacaagagcactatgtgagaa

SEQ ID NO: 1967 - DNA, 19 bp, Artificial Sequence
  Primer
accagaatggaggacgcaa

SEQ ID NO: 1968 - DNA, 19 bp, Artificial Sequence
  Primer
agaatggaggacgcaatgg

SEQ ID NO: 1969 - DNA, 18 bp, Artificial Sequence
  Primer
attgctgcctacactgct

SEQ ID NO: 1970 - DNA, 20 bp, Artificial Sequence
  Primer
ttgctgcctacactgctgct

SEQ ID NO: 1971 - DNA, 21 bp, Artificial Sequence
  Primer
aacctattctgttgcttgacc

SEQ ID NO: 1972 - DNA, 24 bp, Artificial Sequence
  Primer
gctgctcttcaaataccttttgct

SEQ ID NO: 1973 - DNA, 22 bp, Artificial Sequence
  Primer
acacaaactactgaaacagcac

SEQ ID NO: 1974 - DNA, 21 bp, Artificial Sequence
  Primer
gagaaccaaaaacaaatcgcc

SEQ ID NO: 1975 - DNA, 22 bp, Artificial Sequence
  Primer
ccacaagagcactatgtgagaa

SEQ ID NO: 1976 - DNA, 22 bp, Artificial Sequence
  Primer
gagaaccaaaaacaaatcgcca

SEQ ID NO: 1977 - DNA, 20 bp, Artificial Sequence
  Primer
ccaaaaacaaatcgccaacc

SEQ ID NO: 1978 - DNA, 22 bp, Artificial Sequence
  Primer
ccacaagagcactatgtgagaa

SEQ ID NO: 1979 - DNA, 20 bp, Artificial Sequence
  Primer
caaaaacaaatcgccaacca

SEQ ID NO: 1980 - DNA, 22 bp, Artificial Sequence
  Primer
ctctgtctacactgttgaatcc

SEQ ID NO: 1981 - DNA, 22 bp, Artificial Sequence
  Primer
tcattcgcaaatccaaccatag

SEQ ID NO: 1982 - DNA, 18 bp, Artificial Sequence
  Primer
tcaaaggggaatgcccaa

SEQ ID NO: 1983 - DNA, 21 bp, Artificial Sequence
  Primer
actaaaggcacactagaacca

SEQ ID NO: 1984 - DNA, 22 bp, Artificial Sequence
  Primer
ccaaaaacaaatcgccaaccaa

SEQ ID NO: 1985 - DNA, 20 bp, Artificial Sequence
  Primer
aagtcgaggcggaggtacaa

SEQ ID NO: 1986 - DNA, 20 bp, Artificial Sequence
  Primer
aagtcgaggcggaggtacaa

SEQ ID NO: 1987 - DNA, 20 bp, Artificial Sequence
  Primer
gccacaagagcactatgtga

SEQ ID NO: 1988 - DNA, 20 bp, Artificial Sequence
  Primer
agtcgaggcggaggtacaaa

SEQ ID NO: 1989 - DNA, 21 bp, Artificial Sequence
  Primer
ttgaatacacccaaagaccac

SEQ ID NO: 1990 - DNA, 20 bp, Artificial Sequence
  Primer
gccacaagagcactatgtga

SEQ ID NO: 1991 - DNA, 20 bp, Artificial Sequence
  Primer
agtcgaggcggaggtacaaa

SEQ ID NO: 1992 - DNA, 20 bp, Artificial Sequence
  Primer
ctgcaatcaacagacctcaa

SEQ ID NO: 1993 - DNA, 20 bp, Artificial Sequence
  Primer
ctgcaatcaacagacctcaa

SEQ ID NO: 1994 - DNA, 18 bp, Artificial Sequence
  Primer
tcaaaggggaatgcccaa

SEQ ID NO: 1995 - DNA, 21 bp, Artificial Sequence
  Primer
ctgcaatcaacagacctcaaa

SEQ ID NO: 1996 - DNA, 21 bp, Artificial Sequence
  Primer
ctgcaatcaacagacctcaaa

SEQ ID NO: 1997 - DNA, 22 bp, Artificial Sequence
  Primer
gtgtcctttctacattcgtgtc

SEQ ID NO: 1998 - DNA, 21 bp, Artificial Sequence
  Primer
aggacaagagggcaaaagtaa

SEQ ID NO: 1999 - DNA, 21 bp, Artificial Sequence
  Primer
ccacattgaccatccaaatcc

SEQ ID NO: 2000 - DNA, 19 bp, Artificial Sequence
  Primer
gtcttcatcgctcaaagca

SEQ ID NO: 2001 - DNA, 19 bp, Artificial Sequence
  Primer
caaccatgttgttgctgct

SEQ ID NO: 2002 - DNA, 20 bp, Artificial Sequence
  Primer
caaccaccacagacatcaat

SEQ ID NO: 2003 - DNA, 19 bp, Artificial Sequence
  Primer
gcaagggactttaccgtca

SEQ ID NO: 2004 - DNA, 18 bp, Artificial Sequence
  Primer
aacaagaggagccaccaa

SEQ ID NO: 2005 - DNA, 19 bp, Artificial Sequence
  Primer
tatgatgagccgacgacga

SEQ ID NO: 2006 - DNA, 19 bp, Artificial Sequence
  Primer
gtcttcatcgctcaaagca

SEQ ID NO: 2007 - DNA, 19 bp, Artificial Sequence
  Primer
acccaggaaaagccaacca

SEQ ID NO: 2008 - DNA, 19 bp, Artificial Sequence
  Primer
gtcttcatcgctcaaagca

SEQ ID NO: 2009 - DNA, 20 bp, Artificial Sequence
  Primer
gaggacaaccaatcaccaac

SEQ ID NO: 2010 - DNA, 20 bp, Artificial Sequence
  Primer
caaccaccacagacatcaat

SEQ ID NO: 2011 - DNA, 18 bp, Artificial Sequence
  Primer
aacaagaggagccaccaa

SEQ ID NO: 2012 - DNA, 21 bp, Artificial Sequence
  Primer
ccacattgaccatccaaatcc

SEQ ID NO: 2013 - DNA, 21 bp, Artificial Sequence
  Primer
agagtggaagcacctaaacaa

SEQ ID NO: 2014 - DNA, 21 bp, Artificial Sequence
  Primer
ccacattgaccatccaaatcc

SEQ ID NO: 2015 - DNA, 20 bp, Artificial Sequence
  Primer
acatttgctacacaccttcc

SEQ ID NO: 2016 - DNA, 22 bp, Artificial Sequence
  Primer
ctacacaccttccaaactcatt

SEQ ID NO: 2017 - DNA, 19 bp, Artificial Sequence
  Primer
gcaagtcacataagcctcc

SEQ ID NO: 2018 - DNA, 20 bp, Artificial Sequence
  Primer
ccaccacagacatcaatcac

SEQ ID NO: 2019 - DNA, 25 bp, Artificial Sequence
  Primer
ggttccatcatacagtttcctaaca

SEQ ID NO: 2020 - DNA, 22 bp, Artificial Sequence
  Primer
ctacacaccttccaaactcatt

SEQ ID NO: 2021 - DNA, 20 bp, Artificial Sequence
  Primer
gcaagtcacataagcctccc

SEQ ID NO: 2022 - DNA, 22 bp, Artificial Sequence
  Primer
ctacacaccttccaaactcatt

SEQ ID NO: 2023 - DNA, 20 bp, Artificial Sequence
  Primer
ccaccacagacatcaatcac

SEQ ID NO: 2024 - DNA, 22 bp, Artificial Sequence
  Primer
ggcatttcaacaccaaaactca

SEQ ID NO: 2025 - DNA, 19 bp, Artificial Sequence
  Primer
ggaggacaaccaatcacca

SEQ ID NO: 2026 - DNA, 20 bp, Artificial Sequence
  Primer
cggcatttcaacaccaaaac

SEQ ID NO: 2027 - DNA, 18 bp, Artificial Sequence
  Primer
gacggcatttcaacacca

SEQ ID NO: 2028 - DNA, 19 bp, Artificial Sequence
  Primer
aggagccaccaaacacaga

SEQ ID NO: 2029 - DNA, 19 bp, Artificial Sequence
  Primer
gcactctttccgaacaact

SEQ ID NO: 2030 - DNA, 19 bp, Artificial Sequence
  Primer
aggagccaccaaacacaga

SEQ ID NO: 2031 - DNA, 19 bp, Artificial Sequence
  Primer
ttgactacagcagccaaac

SEQ ID NO: 2032 - DNA, 19 bp, Artificial Sequence
  Primer
agccaccaaacacagaaga

SEQ ID NO: 2033 - DNA, 19 bp, Artificial Sequence
  Primer
ggagccaccaaacacagaa

SEQ ID NO: 2034 - DNA, 19 bp, Artificial Sequence
  Primer
ggagccaccaaacacagaa

SEQ ID NO: 2035 - DNA, 21 bp, Artificial Sequence
  Primer
cacattgaccatccaaatcct

SEQ ID NO: 2036 - DNA, 19 bp, Artificial Sequence
  Primer
tcaaaggggaatgcccaaa

SEQ ID NO: 2037 - DNA, 19 bp, Artificial Sequence
  Primer
tcgcagcagaaacgctcaa

SEQ ID NO: 2038 - DNA, 19 bp, Artificial Sequence
  Primer
tcaaaggggaatgcccaaa

SEQ ID NO: 2039 - DNA, 18 bp, Artificial Sequence
  Primer
gcagcagaaacgctcaaa

SEQ ID NO: 2040 - DNA, 19 bp, Artificial Sequence
  Primer
tcaaaggggaatgcccaaa

SEQ ID NO: 2041 - DNA, 19 bp, Artificial Sequence
  Primer
tcaaaggggaatgcccaaa

SEQ ID NO: 2042 - DNA, 19 bp, Artificial Sequence
  Primer
tcaaaggggaatgcccaaa

SEQ ID NO: 2043 - DNA, 19 bp, Artificial Sequence
  Primer
tcaaaggggaatgcccaaa

SEQ ID NO: 2044 - DNA, 18 bp, Artificial Sequence
  Primer
cagaaacgctcaaagcca

SEQ ID NO: 2045 - DNA, 19 bp, Artificial Sequence
  Primer
tcaaaggggaatgcccaaa

SEQ ID NO: 2046 - DNA, 18 bp, Artificial Sequence
  Primer
tcaaaggggaatgcccaa

SEQ ID NO: 2047 - DNA, 19 bp, Artificial Sequence
  Primer
gagccaccaaacacagaag

SEQ ID NO: 2048 - DNA, 19 bp, Artificial Sequence
  Primer
tctgaggacaagagggcaa

SEQ ID NO: 2049 - DNA, 21 bp, Artificial Sequence
  Primer
aggacaagagggcaaaagtaa

SEQ ID NO: 2050 - DNA, 20 bp, Artificial Sequence
  Primer
gtggtccagaacaaacccaa

SEQ ID NO: 2051 - DNA, 19 bp, Artificial Sequence
  Primer
tctgaggacaagagggcaa

SEQ ID NO: 2052 - DNA, 21 bp, Artificial Sequence
  Primer
agaacctacacctgaagaacc

SEQ ID NO: 2053 - DNA, 21 bp, Artificial Sequence
  Primer
agaacctacacctgaagaacc

SEQ ID NO: 2054 - DNA, 20 bp, Artificial Sequence
  Primer
gttctctaccaaccaccaca

SEQ ID NO: 2055 - DNA, 19 bp, Artificial Sequence
  Primer
agaggagccaccaaacaca

SEQ ID NO: 2056 - DNA, 21 bp, Artificial Sequence
  Primer
agaacctacacctgaagaacc

SEQ ID NO: 2057 - DNA, 22 bp, Artificial Sequence
  Primer
gcacctaatgctaaggaagaga

SEQ ID NO: 2058 - DNA, 19 bp, Artificial Sequence
  Primer
accaccttatgtccttccc

SEQ ID NO: 2059 - DNA, 19 bp, Artificial Sequence
  Primer
accaccttatgtccttccc

SEQ ID NO: 2060 - DNA, 19 bp, Artificial Sequence
  Primer
accaccttatgtccttccc

SEQ ID NO: 2061 - DNA, 21 bp, Artificial Sequence
  Primer
gctaccaccttatgtccttcc

SEQ ID NO: 2062 - DNA, 21 bp, Artificial Sequence
  Primer
gctaccaccttatgtccttcc

SEQ ID NO: 2063 - DNA, 18 bp, Artificial Sequence
  Primer
tcaaaggggaatgcccaa

SEQ ID NO: 2064 - DNA, 22 bp, Artificial Sequence
  Primer
ttctgctaatcttgctgctact

SEQ ID NO: 2065 - DNA, 21 bp, Artificial Sequence
  Primer
cacattgaccatccaaatcct

SEQ ID NO: 2066 - DNA, 23 bp, Artificial Sequence
  Primer
gcttctgctaatcttgctgctac

SEQ ID NO: 2067 - DNA, 20 bp, Artificial Sequence
  Primer
ggctatcacaagggcaaaaa

SEQ ID NO: 2068 - DNA, 21 bp, Artificial Sequence
  Primer
gcttctgctaatcttgctgct

SEQ ID NO: 2069 - DNA, 20 bp, Artificial Sequence
  Primer
ggctatcacaagggcaaaaa

SEQ ID NO: 2070 - DNA, 20 bp, Artificial Sequence
  Primer
ccaacaacaacaaggccaaa

SEQ ID NO: 2071 - DNA, 23 bp, Artificial Sequence
  Primer
gcagacttcaaagccttcaaacc

SEQ ID NO: 2072 - DNA, 22 bp, Artificial Sequence
  Primer
cgtcagcgtctaactaaataca

SEQ ID NO: 2073 - DNA, 20 bp, Artificial Sequence
  Primer
ccaacaacaacaaggccaaa

SEQ ID NO: 2074 - DNA, 22 bp, Artificial Sequence
  Primer
acaaactactgaaacagcacac

SEQ ID NO: 2075 - DNA, 21 bp, Artificial Sequence
  Primer
agacttcaaagccttcaaacc

SEQ ID NO: 2076 - DNA, 19 bp, Artificial Sequence
  Primer
ccaacaacaacaaggccaa

SEQ ID NO: 2077 - DNA, 19 bp, Artificial Sequence
  Primer
gagccaccaaacacagaag

SEQ ID NO: 2078 - DNA, 19 bp, Artificial Sequence
  Primer
ccaacaacaacaaggccaa

SEQ ID NO: 2079 - DNA, 19 bp, Artificial Sequence
  Primer
gccaacaacaacaaggcca

SEQ ID NO: 2080 - DNA, 22 bp, Artificial Sequence
  Primer
gcagacttcaaagccttcaaac

SEQ ID NO: 2081 - DNA, 19 bp, Artificial Sequence
  Primer
gccaacaacaacaaggcca

SEQ ID NO: 2082 - DNA, 21 bp, Artificial Sequence
  Primer
ggaacatacgagggcaattca

SEQ ID NO: 2083 - DNA, 18 bp, Artificial Sequence
  Primer
acatccgctctcccattt

SEQ ID NO: 2084 - DNA, 19 bp, Artificial Sequence
  Primer
tcgcagcagaaacgctcaa

SEQ ID NO: 2085 - DNA, 19 bp, Artificial Sequence
  Primer
ttgagccagaaccagaacc

SEQ ID NO: 2086 - DNA, 19 bp, Artificial Sequence
  Primer
tcgcagcagaaacgctcaa

SEQ ID NO: 2087 - DNA, 21 bp, Artificial Sequence
  Primer
ggattttaagcccagatcaca

SEQ ID NO: 2088 - DNA, 22 bp, Artificial Sequence
  Primer
agtagacggcattattcaacag

SEQ ID NO: 2089 - DNA, 19 bp, Artificial Sequence
  Primer
ggaggacaaccaatcacca

SEQ ID NO: 2090 - DNA, 19 bp, Artificial Sequence
  Primer
tcgcagcagaaacgctcaa

SEQ ID NO: 2091 - DNA, 25 bp, Artificial Sequence
  Primer
cgtcagcgtctaactaaatacacaa

SEQ ID NO: 2092 - DNA, 19 bp, Artificial Sequence
  Primer
tgtgctttccttctgtgct

SEQ ID NO: 2093 - DNA, 19 bp, Artificial Sequence
  Primer
ttcgcagcagaaacgctca

SEQ ID NO: 2094 - DNA, 21 bp, Artificial Sequence
  Primer
gctgctaacatacacctgaaa

SEQ ID NO: 2095 - DNA, 21 bp, Artificial Sequence
  Primer
gctgctaacatacacctgaaa

SEQ ID NO: 2096 - DNA, 20 bp, Artificial Sequence
  Primer
aagtcacataagcctcccat

SEQ ID NO: 2097 - DNA, 18 bp, Artificial Sequence
  Primer
acatccgctctcccattt

SEQ ID NO: 2098 - DNA, 21 bp, Artificial Sequence
  Primer
gctacacaccttccaaactca

SEQ ID NO: 2099 - DNA, 22 bp, Artificial Sequence
  Primer
catcgtcaagggtcaaatacag

SEQ ID NO: 2100 - DNA, 24 bp, Artificial Sequence
  Primer
tgatacttctaaccctaagacacc

SEQ ID NO: 2101 - DNA, 22 bp, Artificial Sequence
  Primer
gctacacaccttccaaactcat

SEQ ID NO: 2102 - DNA, 21 bp, Artificial Sequence
  Primer
gctgctaacatacacctgaaa

SEQ ID NO: 2103 - DNA, 21 bp, Artificial Sequence
  Primer
gcacctacgcagtataaacaa

SEQ ID NO: 2104 - DNA, 19 bp, Artificial Sequence
  Primer
ctgaggacaagagggcaaa

SEQ ID NO: 2105 - DNA, 19 bp, Artificial Sequence
  Primer
tctaccaaccaccacagac

SEQ ID NO: 2106 - DNA, 21 bp, Artificial Sequence
  Primer
tgctgctaacatacacctgaa

SEQ ID NO: 2107 - DNA, 19 bp, Artificial Sequence
  Primer
tctaccaaccaccacagac

SEQ ID NO: 2108 - DNA, 20 bp, Artificial Sequence
  Primer
gctcattcgcaaatccaacc

SEQ ID NO: 2109 - DNA, 20 bp, Artificial Sequence
  Primer
caaccaccacagacatcaat

SEQ ID NO: 2110 - DNA, 20 bp, Artificial Sequence
  Primer
gattgagccagaaccagaac

SEQ ID NO: 2111 - DNA, 20 bp, Artificial Sequence
  Primer
gattgagccagaaccagaac

SEQ ID NO: 2112 - DNA, 21 bp, Artificial Sequence
  Primer
tgctgctaacatacacctgaa

SEQ ID NO: 2113 - DNA, 21 bp, Artificial Sequence
  Primer
tgctgctaacatacacctgaa

SEQ ID NO: 2114 - DNA, 22 bp, Artificial Sequence
  Primer
catcgtcaagggtcaaatacag

SEQ ID NO: 2115 - DNA, 20 bp, Artificial Sequence
  Primer
gttctctaccaaccaccaca

SEQ ID NO: 2116 - DNA, 19 bp, Artificial Sequence
  Primer
ggaggacaaccaatcacca

SEQ ID NO: 2117 - DNA, 23 bp, Artificial Sequence
  Primer
gcttacccacttacaaaacatcc

SEQ ID NO: 2118 - DNA, 21 bp, Artificial Sequence
  Primer
ccacattgaccatccaaatcc

SEQ ID NO: 2119 - DNA, 22 bp, Artificial Sequence
  Primer
ctattgttgctgctgctacttt

SEQ ID NO: 2120 - DNA, 19 bp, Artificial Sequence
  Primer
tgcaactactcatgcctct

SEQ ID NO: 2121 - DNA, 19 bp, Artificial Sequence
  Primer
tgttgctgctgctactttg

SEQ ID NO: 2122 - DNA, 22 bp, Artificial Sequence
  Primer
ctacacaccttccaaactcatt

SEQ ID NO: 2123 - DNA, 20 bp, Artificial Sequence
  Primer
gcccatcaggaacatacgag

SEQ ID NO: 2124 - DNA, 20 bp, Artificial Sequence
  Primer
acatttgctacacaccttcc

SEQ ID NO: 2125 - DNA, 19 bp, Artificial Sequence
  Primer
ccaagggaaagcccgtaaa

SEQ ID NO: 2126 - DNA, 22 bp, Artificial Sequence
  Primer
ctacacaccttccaaactcatt

SEQ ID NO: 2127 - DNA, 20 bp, Artificial Sequence
  Primer
actacaaaagagaagcccca

SEQ ID NO: 2128 - DNA, 24 bp, Artificial Sequence
  Primer
ggtcattcaacccagaaacaaaca

SEQ ID NO: 2129 - DNA, 20 bp, Artificial Sequence
  Primer
gactacaaaagagaagcccc

SEQ ID NO: 2130 - DNA, 21 bp, Artificial Sequence
  Primer
ccagatgaggaagaagaggac

SEQ ID NO: 2131 - DNA, 21 bp, Artificial Sequence
  Primer
ccagatgaggaagaagaggac

SEQ ID NO: 2132 - DNA, 20 bp, Artificial Sequence
  Primer
gactacaaaagagaagcccc

SEQ ID NO: 2133 - DNA, 21 bp, Artificial Sequence
  Primer
aggacaagagggcaaaagtaa

SEQ ID NO: 2134 - DNA, 24 bp, Artificial Sequence
  Primer
ggtcattcaacccagaaacaaaca

SEQ ID NO: 2135 - DNA, 22 bp, Artificial Sequence
  Primer
cgtaacattaaaccagtgccag

SEQ ID NO: 2136 - DNA, 21 bp, Artificial Sequence
  Primer
gcgtaacattaaaccagtgcc

SEQ ID NO: 2137 - DNA, 20 bp, Artificial Sequence
  Primer
tgctgctaacatacacctga

SEQ ID NO: 2138 - DNA, 25 bp, Artificial Sequence
  Primer
ggttccatcatacagtttcctaaca

SEQ ID NO: 2139 - DNA, 20 bp, Artificial Sequence
  Primer
taccaagggaaagcccgtaa

SEQ ID NO: 2140 - DNA, 20 bp, Artificial Sequence
  Primer
ggtcattcaacccagaaaca

SEQ ID NO: 2141 - DNA, 20 bp, Artificial Sequence
  Primer
ggtcattcaacccagaaaca

SEQ ID NO: 2142 - DNA, 21 bp, Artificial Sequence
  Primer
tgccgtagtgtcagtatcatc

SEQ ID NO: 2143 - DNA, 22 bp, Artificial Sequence
  Primer
ggctaagcgtaacattaaacca

SEQ ID NO: 2144 - DNA, 21 bp, Artificial Sequence
  Primer
acaactcctggaacaatggaa

SEQ ID NO: 2145 - DNA, 22 bp, Artificial Sequence
  Primer
ctcaggctgaagtagaatggaa

SEQ ID NO: 2146 - DNA, 22 bp, Artificial Sequence
  Primer
cgggtaaccttcagagtaacca

SEQ ID NO: 2147 - DNA, 22 bp, Artificial Sequence
  Primer
gcacctaatgctaaggaagaga

SEQ ID NO: 2148 - DNA, 21 bp, Artificial Sequence
  Primer
ccagaacctacacctgaagaa

SEQ ID NO: 2149 - DNA, 21 bp, Artificial Sequence
  Primer
acaactcctggaacaatggaa

SEQ ID NO: 2150 - DNA, 21 bp, Artificial Sequence
  Primer
ccagaacctacacctgaagaa

SEQ ID NO: 2151 - DNA, 21 bp, Artificial Sequence
  Primer
acaactcctggaacaatggaa

SEQ ID NO: 2152 - DNA, 21 bp, Artificial Sequence
  Primer
acaactcctggaacaatggaa

SEQ ID NO: 2153 - DNA, 21 bp, Artificial Sequence
  Primer
acaactcctggaacaatggaa

SEQ ID NO: 2154 - DNA, 21 bp, Artificial Sequence
  Primer
acaactcctggaacaatggaa

SEQ ID NO: 2155 - DNA, 21 bp, Artificial Sequence
  Primer
gggtaaccttcagagtaacca

SEQ ID NO: 2156 - DNA, 21 bp, Artificial Sequence
  Primer
gggtaaccttcagagtaacca

SEQ ID NO: 2157 - DNA, 19 bp, Artificial Sequence
  Primer
ccgtgaccatgagcatgaa

SEQ ID NO: 2158 - DNA, 19 bp, Artificial Sequence
  Primer
ccgtgaccatgagcatgaa

SEQ ID NO: 2159 - DNA, 20 bp, Artificial Sequence
  Primer
gaggacaaccaatcaccaac

SEQ ID NO: 2160 - DNA, 20 bp, Artificial Sequence
  Primer
ggctttacgggtaaccttca

SEQ ID NO: 2161 - DNA, 20 bp, Artificial Sequence
  Primer
ggctttacgggtaaccttca

SEQ ID NO: 2162 - DNA, 20 bp, Artificial Sequence
  Primer
ccagaacctacacctgaaga

SEQ ID NO: 2163 - DNA, 21 bp, Artificial Sequence
  Primer
ccagatgaggaagaagaggac

SEQ ID NO: 2164 - DNA, 21 bp, Artificial Sequence
  Primer
tgtagacatggtacatgcgaa

SEQ ID NO: 2165 - DNA, 20 bp, Artificial Sequence
  Primer
tgtagagggctgtcatgcaa

SEQ ID NO: 2166 - DNA, 20 bp, Artificial Sequence
  Primer
tgtagagggctgtcatgcaa

SEQ ID NO: 2167 - DNA, 19 bp, Artificial Sequence
  Primer
gtagagggctgtcatgcaa

SEQ ID NO: 2168 - DNA, 21 bp, Artificial Sequence
  Primer
tgtagacatggtacatgcgaa

SEQ ID NO: 2169 - DNA, 20 bp, Artificial Sequence
  Primer
tgctacacaccttccaaact

SEQ ID NO: 2170 - DNA, 21 bp, Artificial Sequence
  Primer
tgtagacatggtacatgcgaa

SEQ ID NO: 2171 - DNA, 24 bp, Artificial Sequence
  Primer
gcaaacaatgctcttcactatgct

SEQ ID NO: 2172 - DNA, 20 bp, Artificial Sequence
  Primer
gccatgcaaaaggagagtga

SEQ ID NO: 2173 - DNA, 20 bp, Artificial Sequence
  Primer
gccatgcaaaaggagagtga

SEQ ID NO: 2174 - DNA, 20 bp, Artificial Sequence
  Primer
tatgatgagccgacgacgac

SEQ ID NO: 2175 - DNA, 20 bp, Artificial Sequence
  Primer
aaccagaacctacacctgaa

SEQ ID NO: 2176 - DNA, 20 bp, Artificial Sequence
  Primer
aaccagaacctacacctgaa

SEQ ID NO: 2177 - DNA, 20 bp, Artificial Sequence
  Primer
gccatgcaaaaggagagtga

SEQ ID NO: 2178 - DNA, 21 bp, Artificial Sequence
  Primer
catgcaaaaggagagtgatga

SEQ ID NO: 2179 - DNA, 21 bp, Artificial Sequence
  Primer
catgcaaaaggagagtgatga

SEQ ID NO: 2180 - DNA, 20 bp, Artificial Sequence
  Primer
tgctacacaccttccaaact

SEQ ID NO: 2181 - DNA, 22 bp, Artificial Sequence
  Primer
ccatgcaaaaggagagtgatga

SEQ ID NO: 2182 - DNA, 22 bp, Artificial Sequence
  Primer
cataccaggcataccaaaggac

SEQ ID NO: 2183 - DNA, 21 bp, Artificial Sequence
  Primer
ataccaggcataccaaaggac

SEQ ID NO: 2184 - DNA, 20 bp, Artificial Sequence
  Primer
tgctacacaccttccaaact

SEQ ID NO: 2185 - DNA, 20 bp, Artificial Sequence
  Primer
gaaccagaacctacacctga

SEQ ID NO: 2186 - DNA, 24 bp, Artificial Sequence
  Primer
gcaaacaatgctcttcactatgct

SEQ ID NO: 2187 - DNA, 21 bp, Artificial Sequence
  Primer
tgaaaacatgacgcccagaga

SEQ ID NO: 2188 - DNA, 19 bp, Artificial Sequence
  Primer
accaggcataccaaaggac

SEQ ID NO: 2189 - DNA, 19 bp, Artificial Sequence
  Primer
accaggcataccaaaggac

SEQ ID NO: 2190 - DNA, 19 bp, Artificial Sequence
  Primer
accaggcataccaaaggac

SEQ ID NO: 2191 - DNA, 22 bp, Artificial Sequence
  Primer
acataccaggcataccaaagga

SEQ ID NO: 2192 - DNA, 20 bp, Artificial Sequence
  Primer
tgctacacaccttccaaact

SEQ ID NO: 2193 - DNA, 19 bp, Artificial Sequence
  Primer
cgtgaccatgagcatgaaa

SEQ ID NO: 2194 - DNA, 21 bp, Artificial Sequence
  Primer
gacataccaggcataccaaag

SEQ ID NO: 2195 - DNA, 21 bp, Artificial Sequence
  Primer
gacataccaggcataccaaag

SEQ ID NO: 2196 - DNA, 20 bp, Artificial Sequence
  Primer
tgctacacaccttccaaact

SEQ ID NO: 2197 - DNA, 19 bp, Artificial Sequence
  Primer
cgtgaccatgagcatgaaa

SEQ ID NO: 2198 - DNA, 18 bp, Artificial Sequence
  Primer
cgacttgcatgatgtgct

SEQ ID NO: 2199 - DNA, 20 bp, Artificial Sequence
  Primer
ggaggacaaccaatcaccaa

SEQ ID NO: 2200 - DNA, 19 bp, Artificial Sequence
  Primer
acatccgctctcccatttt

SEQ ID NO: 2201 - DNA, 21 bp, Artificial Sequence
  Primer
tgacataccaggcataccaaa

SEQ ID NO: 2202 - DNA, 24 bp, Artificial Sequence
  Primer
caccaaaactcaaagaagactacc

SEQ ID NO: 2203 - DNA, 21 bp, Artificial Sequence
  Primer
gtagacatggtacatgcgaaa

SEQ ID NO: 2204 - DNA, 24 bp, Artificial Sequence
  Primer
caccaaaactcaaagaagactacc

SEQ ID NO: 2205 - DNA, 21 bp, Artificial Sequence
  Primer
gtagacatggtacatgcgaaa

SEQ ID NO: 2206 - DNA, 19 bp, Artificial Sequence
  Primer
acatccgctctcccatttt

SEQ ID NO: 2207 - DNA, 20 bp, Artificial Sequence
  Primer
gataagagctacgagcacca

SEQ ID NO: 2208 - DNA, 20 bp, Artificial Sequence
  Primer
ggaggacaaccaatcaccaa

SEQ ID NO: 2209 - DNA, 21 bp, Artificial Sequence
  Primer
gtagacatggtacatgcgaaa

SEQ ID NO: 2210 - DNA, 24 bp, Artificial Sequence
  Primer
ccactcaacatcataccattgact

SEQ ID NO: 2211 - DNA, 20 bp, Artificial Sequence
  Primer
gccagaaccagaacctacac

SEQ ID NO: 2212 - DNA, 22 bp, Artificial Sequence
  Primer
gatgccaactactttgtttgct

SEQ ID NO: 2213 - DNA, 19 bp, Artificial Sequence
  Primer
acaagcctcactccctttc

SEQ ID NO: 2214 - DNA, 19 bp, Artificial Sequence
  Primer
acaagcctcactccctttc

SEQ ID NO: 2215 - DNA, 20 bp, Artificial Sequence
  Primer
tgacataccaggcataccaa

SEQ ID NO: 2216 - DNA, 20 bp, Artificial Sequence
  Primer
gccagaaccagaacctacac

SEQ ID NO: 2217 - DNA, 20 bp, Artificial Sequence
  Primer
gccagaaccagaacctacac

SEQ ID NO: 2218 - DNA, 24 bp, Artificial Sequence
  Primer
ccactcaacatcataccattgact

SEQ ID NO: 2219 - DNA, 20 bp, Artificial Sequence
  Primer
ggaggacaaccaatcaccaa

SEQ ID NO: 2220 - DNA, 20 bp, Artificial Sequence
  Primer
accaatcaaccctactgacc

SEQ ID NO: 2221 - DNA, 19 bp, Artificial Sequence
  Primer
aagagctacgagcaccaga

SEQ ID NO: 2222 - DNA, 19 bp, Artificial Sequence
  Primer
tctgaggacaagagggcaa

SEQ ID NO: 2223 - DNA, 19 bp, Artificial Sequence
  Primer
tctgaggacaagagggcaa

SEQ ID NO: 2224 - DNA, 19 bp, Artificial Sequence
  Primer
aagagctacgagcaccaga

SEQ ID NO: 2225 - DNA, 20 bp, Artificial Sequence
  Primer
gctacacaccttccaaactc

SEQ ID NO: 2226 - DNA, 20 bp, Artificial Sequence
  Primer
gagccagaaccagaacctac

SEQ ID NO: 2227 - DNA, 20 bp, Artificial Sequence
  Primer
gctacacaccttccaaactc

SEQ ID NO: 2228 - DNA, 19 bp, Artificial Sequence
  Primer
aagagctacgagcaccaga

SEQ ID NO: 2229 - DNA, 19 bp, Artificial Sequence
  Primer
aagagctacgagcaccaga

SEQ ID NO: 2230 - DNA, 19 bp, Artificial Sequence
  Primer
aagagctacgagcaccaga

SEQ ID NO: 2231 - DNA, 20 bp, Artificial Sequence
  Primer
caaccaccacagacatcaat

SEQ ID NO: 2232 - DNA, 19 bp, Artificial Sequence
  Primer
agccagaaccagaacctac

SEQ ID NO: 2233 - DNA, 19 bp, Artificial Sequence
  Primer
agccagaaccagaacctac

SEQ ID NO: 2234 - DNA, 21 bp, Artificial Sequence
  Primer
tgttccttttaccctccagat

SEQ ID NO: 2235 - DNA, 21 bp, Artificial Sequence
  Primer
gctaccaccttatgtccttcc

SEQ ID NO: 2236 - DNA, 21 bp, Artificial Sequence
  Primer
taccaagggaaagcccgtaaa

SEQ ID NO: 2237 - DNA, 21 bp, Artificial Sequence
  Primer
aacctattctgttgcttgacc

SEQ ID NO: 2238 - DNA, 20 bp, Artificial Sequence
  Primer
acatttgctacacaccttcc

SEQ ID NO: 2239 - DNA, 22 bp, Artificial Sequence
  Primer
ctacacaccttccaaactcatt

SEQ ID NO: 2240 - DNA, 24 bp, Artificial Sequence
  Primer
acacaaactactgaaacagcacac

SEQ ID NO: 2241 - DNA, 22 bp, Artificial Sequence
  Primer
tatgtccttcccacaagcagcc

SEQ ID NO: 2242 - DNA, 21 bp, Artificial Sequence
  Primer
ccacattgaccatccaaatcc

SEQ ID NO: 2243 - DNA, 20 bp, Artificial Sequence
  Primer
acatttgctacacaccttcc

SEQ ID NO: 2244 - DNA, 22 bp, Artificial Sequence
  Primer
atgtgccatcccaggagaggaa

SEQ ID NO: 2245 - DNA, 22 bp, Artificial Sequence
  Primer
ctacacaccttccaaactcatt

SEQ ID NO: 2246 - DNA, 21 bp, Artificial Sequence
  Primer
gctgctaacatacacctgaaa

SEQ ID NO: 2247 - DNA, 21 bp, Artificial Sequence
  Primer
tgccgtagtgtcagtatcatc

SEQ ID NO: 2248 - DNA, 20 bp, Artificial Sequence
  Primer
agagtggaaggacaggtaga

SEQ ID NO: 2249 - DNA, 19 bp, Artificial Sequence
  Primer
ttgagccagaaccagaacc

SEQ ID NO: 2250 - DNA, 19 bp, Artificial Sequence
  Primer
gagccagaaccagaaccta

SEQ ID NO: 2251 - DNA, 19 bp, Artificial Sequence
  Primer
gagccagaaccagaaccta

SEQ ID NO: 2252 - DNA, 21 bp, Artificial Sequence
  Primer
tgctgctaacatacacctgaa

SEQ ID NO: 2253 - DNA, 21 bp, Artificial Sequence
  Primer
tgccgtagtgtcagtatcatc

SEQ ID NO: 2254 - DNA, 21 bp, Artificial Sequence
  Primer
tgccgtagtgtcagtatcatc

SEQ ID NO: 2255 - DNA, 21 bp, Artificial Sequence
  Primer
tgttccttttaccctccagat

SEQ ID NO: 2256 - DNA, 25 bp, Artificial Sequence
  Primer
gcatacaaaacattcccaccaacag

SEQ ID NO: 2257 - DNA, 24 bp, Artificial Sequence
  Primer
catacaaaacattcccaccaacag

SEQ ID NO: 2258 - DNA, 21 bp, Artificial Sequence
  Primer
acaaaacattcccaccaacag

SEQ ID NO: 2259 - DNA, 22 bp, Artificial Sequence
  Primer
gtactctacactccaaggacca

SEQ ID NO: 2260 - DNA, 24 bp, Artificial Sequence
  Primer
gcatacaaaacattcccaccaaca

SEQ ID NO: 2261 - DNA, 20 bp, Artificial Sequence
  Primer
actctacactccaaggacca

SEQ ID NO: 2262 - DNA, 21 bp, Artificial Sequence
  Primer
cacattgaccatccaaatcct

SEQ ID NO: 2263 - DNA, 21 bp, Artificial Sequence
  Primer
gctacacaccttccaaactca

SEQ ID NO: 2264 - DNA, 21 bp, Artificial Sequence
  Primer
agacttcaaagccttcaaacc

SEQ ID NO: 2265 - DNA, 19 bp, Artificial Sequence
  Primer
atccgctctcccattttgt

SEQ ID NO: 2266 - DNA, 19 bp, Artificial Sequence
  Primer
gcaagggactttaccgtca

SEQ ID NO: 2267 - DNA, 22 bp, Artificial Sequence
  Primer
gctacaaacaatgtctttcgct

SEQ ID NO: 2268 - DNA, 21 bp, Artificial Sequence
  Primer
gcatacaaaacattcccacca

SEQ ID NO: 2269 - DNA, 22 bp, Artificial Sequence
  Primer
gcagacttcaaagccttcaaac

SEQ ID NO: 2270 - DNA, 19 bp, Artificial Sequence
  Primer
actacagcagccaaactca

SEQ ID NO: 2271 - DNA, 21 bp, Artificial Sequence
  Primer
gacgcatacaaaacattccca

SEQ ID NO: 2272 - DNA, 21 bp, Artificial Sequence
  Primer
accaagggaaagcccgtaaaa

SEQ ID NO: 2273 - DNA, 19 bp, Artificial Sequence
  Primer
actacagcagccaaactca

SEQ ID NO: 2274 - DNA, 19 bp, Artificial Sequence
  Primer
tccgctctcccattttgtc

SEQ ID NO: 2275 - DNA, 22 bp, Artificial Sequence
  Primer
ccacaagagcactatgtgagaa

SEQ ID NO: 2276 - DNA, 24 bp, Artificial Sequence
  Primer
gcagattatcacaaccactcaaac

SEQ ID NO: 2277 - DNA, 23 bp, Artificial Sequence
  Primer
ccaagacctaatcagacaaggaa

SEQ ID NO: 2278 - DNA, 20 bp, Artificial Sequence
  Primer
agtcgaggcggaggtacaaa

SEQ ID NO: 2279 - DNA, 20 bp, Artificial Sequence
  Primer
agtcgaggcggaggtacaaa

SEQ ID NO: 2280 - DNA, 22 bp, Artificial Sequence
  Primer
tgaggaagaagaagaggaagac

SEQ ID NO: 2281 - DNA, 25 bp, Artificial Sequence
  Primer
gcagattatcacaaccactcaaaca

SEQ ID NO: 2282 - DNA, 20 bp, Artificial Sequence
  Primer
aagtcgaggcggaggtacaa

SEQ ID NO: 2283 - DNA, 20 bp, Artificial Sequence
  Primer
aagtcgaggcggaggtacaa

SEQ ID NO: 2284 - DNA, 21 bp, Artificial Sequence
  Primer
ccacaagagcactatgtgaga

SEQ ID NO: 2285 - DNA, 21 bp, Artificial Sequence
  Primer
ggcattactatcagaccacca

SEQ ID NO: 2286 - DNA, 20 bp, Artificial Sequence
  Primer
aaagtcgaggcggaggtaca

SEQ ID NO: 2287 - DNA, 20 bp, Artificial Sequence
  Primer
aaagtcgaggcggaggtaca

SEQ ID NO: 2288 - DNA, 23 bp, Artificial Sequence
  Primer
ggtccagaacaaacccaaggaaa

SEQ ID NO: 2289 - DNA, 22 bp, Artificial Sequence
  Primer
gtccagaacaaacccaaggaaa

SEQ ID NO: 2290 - DNA, 21 bp, Artificial Sequence
  Primer
tccagaacaaacccaaggaaa

SEQ ID NO: 2291 - DNA, 23 bp, Artificial Sequence
  Primer
ctgacaataaccagaatggagga

SEQ ID NO: 2292 - DNA, 21 bp, Artificial Sequence
  Primer
tccagaacaaacccaaggaaa

SEQ ID NO: 2293 - DNA, 20 bp, Artificial Sequence
  Primer
aaagtcgaggcggaggtaca

SEQ ID NO: 2294 - DNA, 23 bp, Artificial Sequence
  Primer
tggtccagaacaaacccaaggaa

SEQ ID NO: 2295 - DNA, 19 bp, Artificial Sequence
  Primer
tgaggacaagagggcaaaa

SEQ ID NO: 2296 - DNA, 22 bp, Artificial Sequence
  Primer
ggtccagaacaaacccaaggaa

SEQ ID NO: 2297 - DNA, 19 bp, Artificial Sequence
  Primer
tgccccccgcattacattt

SEQ ID NO: 2298 - DNA, 20 bp, Artificial Sequence
  Primer
tccagaacaaacccaaggaa

SEQ ID NO: 2299 - DNA, 19 bp, Artificial Sequence
  Primer
tgccccccgcattacattt

SEQ ID NO: 2300 - DNA, 20 bp, Artificial Sequence
  Primer
tccagaacaaacccaaggaa

SEQ ID NO: 2301 - DNA, 22 bp, Artificial Sequence
  Primer
ccaaaaacaaatcgccaaccaa

SEQ ID NO: 2302 - DNA, 19 bp, Artificial Sequence
  Primer
tggtccagaacaaacccaa

SEQ ID NO: 2303 - DNA, 21 bp, Artificial Sequence
  Primer
ggcattactatcagaccacca

SEQ ID NO: 2304 - DNA, 20 bp, Artificial Sequence
  Primer
gccacaagagcactatgtga

SEQ ID NO: 2305 - DNA, 20 bp, Artificial Sequence
  Primer
tgccatgtcctgcctgtcaa

SEQ ID NO: 2306 - DNA, 22 bp, Artificial Sequence
  Primer
gctattgttgctgctgctactt

SEQ ID NO: 2307 - DNA, 21 bp, Artificial Sequence
  Primer
ccaaaaacaaatcgccaacca

SEQ ID NO: 2308 - DNA, 18 bp, Artificial Sequence
  Primer
cagaaacgctcaaagcca

SEQ ID NO: 2309 - DNA, 21 bp, Artificial Sequence
  Primer
accaaaaacaaatcgccaacc

SEQ ID NO: 2310 - DNA, 22 bp, Artificial Sequence
  Primer
gctggatgatactactgagcaa

SEQ ID NO: 2311 - DNA, 22 bp, Artificial Sequence
  Primer
gctggatgatactactgagcaa

SEQ ID NO: 2312 - DNA, 22 bp, Artificial Sequence
  Primer
gagaaccaaaaacaaatcgcca

SEQ ID NO: 2313 - DNA, 19 bp, Artificial Sequence
  Primer
agcagaaacgctcaaagcc

SEQ ID NO: 2314 - DNA, 19 bp, Artificial Sequence
  Primer
cgcagcagaaacgctcaaa

SEQ ID NO: 2315 - DNA, 22 bp, Artificial Sequence
  Primer
gctggatgatactactgagcaa

SEQ ID NO: 2316 - DNA, 18 bp, Artificial Sequence
  Primer
gcagcagaaacgctcaaa

SEQ ID NO: 2317 - DNA, 19 bp, Artificial Sequence
  Primer
actacagcagccaaactca

SEQ ID NO: 2318 - DNA, 20 bp, Artificial Sequence
  Primer
catctaaaaagcctcgccaa

SEQ ID NO: 2319 - DNA, 20 bp, Artificial Sequence
  Primer
tgattgctgcctacactgct

SEQ ID NO: 2320 - DNA, 19 bp, Artificial Sequence
  Primer
gctgcaactactcatgcct

SEQ ID NO: 2321 - DNA, 20 bp, Artificial Sequence
  Primer
gcatctaaaaagcctcgcca

SEQ ID NO: 2322 - DNA, 24 bp, Artificial Sequence
  Primer
gatgatatgattgctgcctacact

SEQ ID NO: 2323 - DNA, 19 bp, Artificial Sequence
  Primer
gcatctaaaaagcctcgcc

SEQ ID NO: 2324 - DNA, 20 bp, Artificial Sequence
  Primer
attgactacagcagccaaac

SEQ ID NO: 2325 - DNA, 25 bp, Artificial Sequence
  Primer
aggaacatacgagggcaattcacca

SEQ ID NO: 2326 - DNA, 24 bp, Artificial Sequence
  Primer
ggaacatacgagggcaattcacca

SEQ ID NO: 2327 - DNA, 24 bp, Artificial Sequence
  Primer
ggaacatacgagggcaattcacca

SEQ ID NO: 2328 - DNA, 23 bp, Artificial Sequence
  Primer
cctgaccctctaaagccaactaa

SEQ ID NO: 2329 - DNA, 22 bp, Artificial Sequence
  Primer
gctggatgatactactgagcaa

SEQ ID NO: 2330 - DNA, 21 bp, Artificial Sequence
  Primer
tgaccctctaaagccaactaa

SEQ ID NO: 2331 - DNA, 24 bp, Artificial Sequence
  Primer
tcaggaacatacgagggcaattca

SEQ ID NO: 2332 - DNA, 24 bp, Artificial Sequence
  Primer
tcaggaacatacgagggcaattca

SEQ ID NO: 2333 - DNA, 24 bp, Artificial Sequence
  Primer
tcaggaacatacgagggcaattca

SEQ ID NO: 2334 - DNA, 19 bp, Artificial Sequence
  Primer
tcgcagcagaaacgctcaa

SEQ ID NO: 2335 - DNA, 21 bp, Artificial Sequence
  Primer
ggaacatacgagggcaattca

SEQ ID NO: 2336 - DNA, 21 bp, Artificial Sequence
  Primer
ggaacatacgagggcaattca

SEQ ID NO: 2337 - DNA, 21 bp, Artificial Sequence
  Primer
ggaacatacgagggcaattca

SEQ ID NO: 2338 - DNA, 19 bp, Artificial Sequence
  Primer
tcttctcgctcctcatcac

SEQ ID NO: 2339 - DNA, 19 bp, Artificial Sequence
  Primer
tgcaactactcatgcctct

SEQ ID NO: 2340 - DNA, 20 bp, Artificial Sequence
  Primer
gcaagggaggtaggactaga

SEQ ID NO: 2341 - DNA, 20 bp, Artificial Sequence
  Primer
gcaagggaggtaggactaga

SEQ ID NO: 2342 - DNA, 20 bp, Artificial Sequence
  Primer
gcaagggaggtaggactaga

SEQ ID NO: 2343 - DNA, 20 bp, Artificial Sequence
  Primer
tcagagattgagccagaacc

SEQ ID NO: 2344 - DNA, 20 bp, Artificial Sequence
  Primer
tcagagattgagccagaacc

SEQ ID NO: 2345 - DNA, 19 bp, Artificial Sequence
  Primer
atacgagggcaattcacca

SEQ ID NO: 2346 - DNA, 20 bp, Artificial Sequence
  Primer
ccaaccaccacagacatcaa

SEQ ID NO: 2347 - DNA, 20 bp, Artificial Sequence
  Primer
gcaagggaggtaggactaga

SEQ ID NO: 2348 - DNA, 21 bp, Artificial Sequence
  Primer
gctacacaccttccaaactca

SEQ ID NO: 2349 - DNA, 20 bp, Artificial Sequence
  Primer
caagtcacataagcctccca

SEQ ID NO: 2350 - DNA, 20 bp, Artificial Sequence
  Primer
ccaggcataccaaaggacat

SEQ ID NO: 2351 - DNA, 20 bp, Artificial Sequence
  Primer
aggcataccaaaggacatga

SEQ ID NO: 2352 - DNA, 20 bp, Artificial Sequence
  Primer
aggacatgacctaccgtaga

SEQ ID NO: 2353 - DNA, 20 bp, Artificial Sequence
  Primer
ttgctacacaccttccaaac

SEQ ID NO: 2354 - DNA, 20 bp, Artificial Sequence
  Primer
caagtcacataagcctccca

SEQ ID NO: 2355 - DNA, 21 bp, Artificial Sequence
  Primer
tcatcctacacaggcacctac

SEQ ID NO: 2356 - DNA, 21 bp, Artificial Sequence
  Primer
ggaacatacgagggcaattca

SEQ ID NO: 2357 - DNA, 20 bp, Artificial Sequence
  Primer
caagtcacataagcctccca

SEQ ID NO: 2358 - DNA, 20 bp, Artificial Sequence
  Primer
gcaagggaggtaggactaga

SEQ ID NO: 2359 - DNA, 20 bp, Artificial Sequence
  Primer
tgccaacctattctgttgct

SEQ ID NO: 2360 - DNA, 20 bp, Artificial Sequence
  Primer
ggctttacgggtaaccttca

SEQ ID NO: 2361 - DNA, 19 bp, Artificial Sequence
  Primer
ttgactacagcagccaaac

SEQ ID NO: 2362 - DNA, 19 bp, Artificial Sequence
  Primer
gcactctttccgaacaact

SEQ ID NO: 2363 - DNA, 21 bp, Artificial Sequence
  Primer
caagtcacataagcctcccat

SEQ ID NO: 2364 - DNA, 20 bp, Artificial Sequence
  Primer
agcctcccattagttttcca

SEQ ID NO: 2365 - DNA, 20 bp, Artificial Sequence
  Primer
agcctcccattagttttcca

SEQ ID NO: 2366 - DNA, 24 bp, Artificial Sequence
  Primer
gcagattatcacaaccactcaaac

SEQ ID NO: 2367 - DNA, 20 bp, Artificial Sequence
  Primer
agcctcccattagttttcca

SEQ ID NO: 2368 - DNA, 20 bp, Artificial Sequence
  Primer
agcctcccattagttttcca

SEQ ID NO: 2369 - DNA, 20 bp, Artificial Sequence
  Primer
agcctcccattagttttcca

SEQ ID NO: 2370 - DNA, 20 bp, Artificial Sequence
  Primer
agcctcccattagttttcca

SEQ ID NO: 2371 - DNA, 20 bp, Artificial Sequence
  Primer
agcctcccattagttttcca

SEQ ID NO: 2372 - DNA, 20 bp, Artificial Sequence
  Primer
agcctcccattagttttcca

SEQ ID NO: 2373 - DNA, 25 bp, Artificial Sequence
  Primer
ctaaccctaagacacccaagtataa

SEQ ID NO: 2374 - DNA, 19 bp, Artificial Sequence
  Primer
ttcgcagcagaaacgctca

SEQ ID NO: 2375 - DNA, 22 bp, Artificial Sequence
  Primer
ggctaagcgtaacattaaacca

SEQ ID NO: 2376 - DNA, 20 bp, Artificial Sequence
  Primer
agattgagccagaaccagaa

SEQ ID NO: 2377 - DNA, 20 bp, Artificial Sequence
  Primer
agattgagccagaaccagaa

SEQ ID NO: 2378 - DNA, 22 bp, Artificial Sequence
  Primer
ggctaagcgtaacattaaacca

SEQ ID NO: 2379 - DNA, 21 bp, Artificial Sequence
  Primer
gcagattatcacaaccactca

SEQ ID NO: 2380 - DNA, 21 bp, Artificial Sequence
  Primer
gcagattatcacaaccactca

SEQ ID NO: 2381 - DNA, 20 bp, Artificial Sequence
  Primer
gctacacaccttccaaactc

SEQ ID NO: 2382 - DNA, 20 bp, Artificial Sequence
  Primer
gactacaaaagagaagcccc

SEQ ID NO: 2383 - DNA, 20 bp, Artificial Sequence
  Primer
gctacacaccttccaaactc

SEQ ID NO: 2384 - DNA, 19 bp, Artificial Sequence
  Primer
ctaccaaccaccacagaca

SEQ ID NO: 2385 - DNA, 19 bp, Artificial Sequence
  Primer
tcaggaacatacgagggca

SEQ ID NO: 2386 - DNA, 19 bp, Artificial Sequence
  Primer
ctaccaaccaccacagaca

SEQ ID NO: 2387 - DNA, 19 bp, Artificial Sequence
  Primer
tcaggaacatacgagggca

SEQ ID NO: 2388 - DNA, 19 bp, Artificial Sequence
  Primer
tcaggaacatacgagggca

SEQ ID NO: 2389 - DNA, 19 bp, Artificial Sequence
  Primer
gcactctttccgaacaact

SEQ ID NO: 2390 - DNA, 19 bp, Artificial Sequence
  Primer
tcaggaacatacgagggca

SEQ ID NO: 2391 - DNA, 19 bp, Artificial Sequence
  Primer
tcgcagcagaaacgctcaa

SEQ ID NO: 2392 - DNA, 20 bp, Artificial Sequence
  Primer
gactacaaaagagaagcccc

SEQ ID NO: 2393 - DNA, 18 bp, Artificial Sequence
  Primer
gcagcagaaacgctcaaa

SEQ ID NO: 2394 - DNA, 21 bp, Artificial Sequence
  Primer
ggcattactatcagaccacca

SEQ ID NO: 2395 - DNA, 20 bp, Artificial Sequence
  Primer
gtagcggtataacactggga

SEQ ID NO: 2396 - DNA, 19 bp, Artificial Sequence
  Primer
gcactctttccgaacaact

SEQ ID NO: 2397 - DNA, 19 bp, Artificial Sequence
  Primer
ctaccaaccaccacagaca

SEQ ID NO: 2398 - DNA, 19 bp, Artificial Sequence
  Primer
gcactctttccgaacaact

SEQ ID NO: 2399 - DNA, 21 bp, Artificial Sequence
  Primer
ggcattactatcagaccacca

SEQ ID NO: 2400 - DNA, 20 bp, Artificial Sequence
  Primer
actacaaaagagaagcccca

SEQ ID NO: 2401 - DNA, 20 bp, Artificial Sequence
  Primer
gcccatcaggaacatacgag

SEQ ID NO: 2402 - DNA, 20 bp, Artificial Sequence
  Primer
gcccatcaggaacatacgag

SEQ ID NO: 2403 - DNA, 20 bp, Artificial Sequence
  Primer
gcccatcaggaacatacgag

SEQ ID NO: 2404 - DNA, 20 bp, Artificial Sequence
  Primer
gctacacaccttccaaactc

SEQ ID NO: 2405 - DNA, 19 bp, Artificial Sequence
  Primer
tgctgccaagaagaacaac

SEQ ID NO: 2406 - DNA, 18 bp, Artificial Sequence
  Primer
aaaagagaagccccagca

SEQ ID NO: 2407 - DNA, 18 bp, Artificial Sequence
  Primer
aaaagagaagccccagca

SEQ ID NO: 2408 - DNA, 19 bp, Artificial Sequence
  Primer
agcagaaacgctcaaagcc

SEQ ID NO: 2409 - DNA, 19 bp, Artificial Sequence
  Primer
gctgcaactactcatgcct

SEQ ID NO: 2410 - DNA, 19 bp, Artificial Sequence
  Primer
gcactctttccgaacaact

SEQ ID NO: 2411 - DNA, 21 bp, Artificial Sequence
  Primer
cacattgaccatccaaatcct

SEQ ID NO: 2412 - DNA, 22 bp, Artificial Sequence
  Primer
gctgccaagaagaacaacatac

SEQ ID NO: 2413 - DNA, 19 bp, Artificial Sequence
  Primer
tctaccaaccaccacagac

SEQ ID NO: 2414 - DNA, 19 bp, Artificial Sequence
  Primer
gctcaaagccactgaggaa

SEQ ID NO: 2415 - DNA, 20 bp, Artificial Sequence
  Primer
gctcaaagccactgaggaaa

SEQ ID NO: 2416 - DNA, 19 bp, Artificial Sequence
  Primer
tctaccaaccaccacagac

SEQ ID NO: 2417 - DNA, 21 bp, Artificial Sequence
  Primer
cacattgaccatccaaatcct

SEQ ID NO: 2418 - DNA, 20 bp, Artificial Sequence
  Primer
ctcattcgcaaatccaacca

SEQ ID NO: 2419 - DNA, 22 bp, Artificial Sequence
  Primer
ctctgtctacactgttgaatcc

SEQ ID NO: 2420 - DNA, 19 bp, Artificial Sequence
  Primer
aaaagagaagccccagcac

SEQ ID NO: 2421 - DNA, 22 bp, Artificial Sequence
  Primer
gtgtcctttctacattcgtgtc

SEQ ID NO: 2422 - DNA, 24 bp, Artificial Sequence
  Primer
gataagagctacgagcaccagaca

SEQ ID NO: 2423 - DNA, 24 bp, Artificial Sequence
  Primer
gataagagctacgagcaccagaca

SEQ ID NO: 2424 - DNA, 24 bp, Artificial Sequence
  Primer
gataagagctacgagcaccagaca

SEQ ID NO: 2425 - DNA, 20 bp, Artificial Sequence
  Primer
acaggcacctacacacctca

SEQ ID NO: 2426 - DNA, 24 bp, Artificial Sequence
  Primer
gataagagctacgagcaccagaca

SEQ ID NO: 2427 - DNA, 19 bp, Artificial Sequence
  Primer
ggaggacaaccaatcacca

SEQ ID NO: 2428 - DNA, 24 bp, Artificial Sequence
  Primer
gataagagctacgagcaccagaca

SEQ ID NO: 2429 - DNA, 19 bp, Artificial Sequence
  Primer
aagagctacgagcaccaga

SEQ ID NO: 2430 - DNA, 19 bp, Artificial Sequence
  Primer
aagagctacgagcaccaga

SEQ ID NO: 2431 - DNA, 20 bp, Artificial Sequence
  Primer
tgccaagaaacctactgaga

SEQ ID NO: 2432 - DNA, 19 bp, Artificial Sequence
  Primer
aagagctacgagcaccaga

SEQ ID NO: 2433 - DNA, 22 bp, Artificial Sequence
  Primer
gctgctaacatacacctgaaac

SEQ ID NO: 2434 - DNA, 22 bp, Artificial Sequence
  Primer
gctacacaccttccaaactcat

SEQ ID NO: 2435 - DNA, 18 bp, Artificial Sequence
  Primer
ggcgacatttcaggcatt

SEQ ID NO: 2436 - DNA, 22 bp, Artificial Sequence
  Primer
gctgctaacatacacctgaaac

SEQ ID NO: 2437 - DNA, 19 bp, Artificial Sequence
  Primer
ggagaggaacttcaccaca

SEQ ID NO: 2438 - DNA, 22 bp, Artificial Sequence
  Primer
gctacacaccttccaaactcat

SEQ ID NO: 2439 - DNA, 20 bp, Artificial Sequence
  Primer
acaggcacctacacacctca

SEQ ID NO: 2440 - DNA, 19 bp, Artificial Sequence
  Primer
caggagaggaacttcacca

SEQ ID NO: 2441 - DNA, 22 bp, Artificial Sequence
  Primer
tcctacacaggcacctacacac

SEQ ID NO: 2442 - DNA, 19 bp, Artificial Sequence
  Primer
tacacaggcacctacacac

SEQ ID NO: 2443 - DNA, 19 bp, Artificial Sequence
  Primer
tcccaggagaggaacttca

SEQ ID NO: 2444 - DNA, 19 bp, Artificial Sequence
  Primer
tacacaggcacctacacac

SEQ ID NO: 2445 - DNA, 19 bp, Artificial Sequence
  Primer
tacacaggcacctacacac

SEQ ID NO: 2446 - DNA, 19 bp, Artificial Sequence
  Primer
tacacaggcacctacacac

SEQ ID NO: 2447 - DNA, 21 bp, Artificial Sequence
  Primer
tcctacacaggcacctacaca

SEQ ID NO: 2448 - DNA, 22 bp, Artificial Sequence
  Primer
gctgctaacatacacctgaaac

SEQ ID NO: 2449 - DNA, 20 bp, Artificial Sequence
  Primer
caaagacatctgaggagcac

SEQ ID NO: 2450 - DNA, 20 bp, Artificial Sequence
  Primer
cctacacaggcacctacaca

SEQ ID NO: 2451 - DNA, 20 bp, Artificial Sequence
  Primer
cctacacaggcacctacaca

SEQ ID NO: 2452 - DNA, 20 bp, Artificial Sequence
  Primer
gaggacaaccaatcaccaac

SEQ ID NO: 2453 - DNA, 22 bp, Artificial Sequence
  Primer
gctacacaccttccaaactcat

SEQ ID NO: 2454 - DNA, 20 bp, Artificial Sequence
  Primer
ccaaaaacaaatcgccaacc

SEQ ID NO: 2455 - DNA, 19 bp, Artificial Sequence
  Primer
ctacacaggcacctacaca

SEQ ID NO: 2456 - DNA, 20 bp, Artificial Sequence
  Primer
ttgctacacaccttccaaac

SEQ ID NO: 2457 - DNA, 20 bp, Artificial Sequence
  Primer
ggctaccaccttatgtcctt

SEQ ID NO: 2458 - DNA, 22 bp, Artificial Sequence
  Primer
gctacacaccttccaaactcat

SEQ ID NO: 2459 - DNA, 20 bp, Artificial Sequence
  Primer
tatgatgagccgacgacgac

SEQ ID NO: 2460 - DNA, 20 bp, Artificial Sequence
  Primer
tatgatgagccgacgacgac

SEQ ID NO: 2461 - DNA, 20 bp, Artificial Sequence
  Primer
catcctacacaggcacctac

SEQ ID NO: 2462 - DNA, 22 bp, Artificial Sequence
  Primer
ttctgctaatcttgctgctact

SEQ ID NO: 2463 - DNA, 20 bp, Artificial Sequence
  Primer
acatttgctacacaccttcc

SEQ ID NO: 2464 - DNA, 21 bp, Artificial Sequence
  Primer
tctgctaatcttgctgctact

SEQ ID NO: 2465 - DNA, 20 bp, Artificial Sequence
  Primer
tcctacacaggcacctacac

SEQ ID NO: 2466 - DNA, 22 bp, Artificial Sequence
  Primer
cttctgctaatcttgctgctac

SEQ ID NO: 2467 - DNA, 22 bp, Artificial Sequence
  Primer
cttctgctaatcttgctgctac

SEQ ID NO: 2468 - DNA, 21 bp, Artificial Sequence
  Primer
ttctgctaatcttgctgctac

SEQ ID NO: 2469 - DNA, 21 bp, Artificial Sequence
  Primer
ttctgctaatcttgctgctac

SEQ ID NO: 2470 - DNA, 21 bp, Artificial Sequence
  Primer
ttctgctaatcttgctgctac

SEQ ID NO: 2471 - DNA, 20 bp, Artificial Sequence
  Primer
tcctacacaggcacctacac

SEQ ID NO: 2472 - DNA, 20 bp, Artificial Sequence
  Primer
tcctacacaggcacctacac

SEQ ID NO: 2473 - DNA, 20 bp, Artificial Sequence
  Primer
tcctacacaggcacctacac

SEQ ID NO: 2474 - DNA, 20 bp, Artificial Sequence
  Primer
tcctacacaggcacctacac

SEQ ID NO: 2475 - DNA, 22 bp, Artificial Sequence
  Primer
cagacttcaaagccttcaaacc

SEQ ID NO: 2476 - DNA, 22 bp, Artificial Sequence
  Primer
tcatcctacacaggcacctaca

SEQ ID NO: 2477 - DNA, 21 bp, Artificial Sequence
  Primer
agacttcaaagccttcaaacc

SEQ ID NO: 2478 - DNA, 19 bp, Artificial Sequence
  Primer
tctgaggacaagagggcaa

SEQ ID NO: 2479 - DNA, 22 bp, Artificial Sequence
  Primer
cctcacttcgtcatcaaagaca

SEQ ID NO: 2480 - DNA, 21 bp, Artificial Sequence
  Primer
catcctacacaggcacctaca

SEQ ID NO: 2481 - DNA, 20 bp, Artificial Sequence
  Primer
atcctacacaggcacctaca

SEQ ID NO: 2482 - DNA, 22 bp, Artificial Sequence
  Primer
gcagacttcaaagccttcaaac

SEQ ID NO: 2483 - DNA, 22 bp, Artificial Sequence
  Primer
gcagacttcaaagccttcaaac

SEQ ID NO: 2484 - DNA, 20 bp, Artificial Sequence
  Primer
gacttgtgctgcctactact

SEQ ID NO: 2485 - DNA, 19 bp, Artificial Sequence
  Primer
tcctacacaggcacctaca

SEQ ID NO: 2486 - DNA, 21 bp, Artificial Sequence
  Primer
ccacattgaccatccaaatcc

SEQ ID NO: 2487 - DNA, 20 bp, Artificial Sequence
  Primer
gaaccagaacctacacctga

SEQ ID NO: 2488 - DNA, 22 bp, Artificial Sequence
  Primer
ggcatttcaacaccaaaactca

SEQ ID NO: 2489 - DNA, 20 bp, Artificial Sequence
  Primer
gaaccagaacctacacctga

SEQ ID NO: 2490 - DNA, 21 bp, Artificial Sequence
  Primer
ccacattgaccatccaaatcc

SEQ ID NO: 2491 - DNA, 20 bp, Artificial Sequence
  Primer
cggcatttcaacaccaaaac

SEQ ID NO: 2492 - DNA, 19 bp, Artificial Sequence
  Primer
gcagacttcaaagccttca

SEQ ID NO: 2493 - DNA, 18 bp, Artificial Sequence
  Primer
gacggcatttcaacacca

SEQ ID NO: 2494 - DNA, 20 bp, Artificial Sequence
  Primer
catcctacacaggcacctac

SEQ ID NO: 2495 - DNA, 20 bp, Artificial Sequence
  Primer
catcctacacaggcacctac

SEQ ID NO: 2496 - DNA, 19 bp, Artificial Sequence
  Primer
gcagacttcaaagccttca

SEQ ID NO: 2497 - DNA, 20 bp, Artificial Sequence
  Primer
catcctacacaggcacctac

SEQ ID NO: 2498 - DNA, 19 bp, Artificial Sequence
  Primer
gcagacttcaaagccttca

SEQ ID NO: 2499 - DNA, 19 bp, Artificial Sequence
  Primer
acaagcctcactccctttc

SEQ ID NO: 2500 - DNA, 19 bp, Artificial Sequence
  Primer
acaagcctcactccctttc

SEQ ID NO: 2501 - DNA, 19 bp, Artificial Sequence
  Primer
gataccgctacaagcctca

SEQ ID NO: 2502 - DNA, 20 bp, Artificial Sequence
  Primer
tcttcatcctacacaggcac

SEQ ID NO: 2503 - DNA, 20 bp, Artificial Sequence
  Primer
tcttcatcctacacaggcac

SEQ ID NO: 2504 - DNA, 19 bp, Artificial Sequence
  Primer
gataccgctacaagcctca

SEQ ID NO: 2505 - DNA, 20 bp, Artificial Sequence
  Primer
tcttcatcctacacaggcac

SEQ ID NO: 2506 - DNA, 21 bp, Artificial Sequence
  Primer
ggtcttcatcctacacaggca

SEQ ID NO: 2507 - DNA, 21 bp, Artificial Sequence
  Primer
ccacattgaccatccaaatcc

SEQ ID NO: 2508 - DNA, 22 bp, Artificial Sequence
  Primer
ctacacaccttccaaactcatt

SEQ ID NO: 2509 - DNA, 19 bp, Artificial Sequence
  Primer
gataccgctacaagcctca

SEQ ID NO: 2510 - DNA, 22 bp, Artificial Sequence
  Primer
ctgccaagaagaacaacatacc

SEQ ID NO: 2511 - DNA, 21 bp, Artificial Sequence
  Primer
tgatgttctctaccaaccacc

SEQ ID NO: 2512 - DNA, 22 bp, Artificial Sequence
  Primer
ctgccaagaagaacaacatacc

SEQ ID NO: 2513 - DNA, 20 bp, Artificial Sequence
  Primer
ggctatcacaagggcaaaaa

SEQ ID NO: 2514 - DNA, 20 bp, Artificial Sequence
  Primer
gaggacaaccaatcaccaac

SEQ ID NO: 2515 - DNA, 19 bp, Artificial Sequence
  Primer
agcaacgataccgctacaa

SEQ ID NO: 2516 - DNA, 19 bp, Artificial Sequence
  Primer
agcaacgataccgctacaa

SEQ ID NO: 2517 - DNA, 20 bp, Artificial Sequence
  Primer
gaggacaaccaatcaccaac

SEQ ID NO: 2518 - DNA, 22 bp, Artificial Sequence
  Primer
acaaactactgaaacagcacac

SEQ ID NO: 2519 - DNA, 19 bp, Artificial Sequence
  Primer
agcaacgataccgctacaa

SEQ ID NO: 2520 - DNA, 19 bp, Artificial Sequence
  Primer
agcaacgataccgctacaa

SEQ ID NO: 2521 - DNA, 19 bp, Artificial Sequence
  Primer
cagcaacgataccgctaca

SEQ ID NO: 2522 - DNA, 22 bp, Artificial Sequence
  Primer
ctacacaccttccaaactcatt

SEQ ID NO: 2523 - DNA, 21 bp, Artificial Sequence
  Primer
caaactactgaaacagcacac

SEQ ID NO: 2524 - DNA, 21 bp, Artificial Sequence
  Primer
caaactactgaaacagcacac

SEQ ID NO: 2525 - DNA, 21 bp, Artificial Sequence
  Primer
caaactactgaaacagcacac

SEQ ID NO: 2526 - DNA, 21 bp, Artificial Sequence
  Primer
caaactactgaaacagcacac

SEQ ID NO: 2527 - DNA, 21 bp, Artificial Sequence
  Primer
caaactactgaaacagcacac

SEQ ID NO: 2528 - DNA, 20 bp, Artificial Sequence
  Primer
caaaaacaaatcgccaacca

SEQ ID NO: 2529 - DNA, 18 bp, Artificial Sequence
  Primer
agcaacgataccgctaca

SEQ ID NO: 2530 - DNA, 18 bp, Artificial Sequence
  Primer
gtttggctcggcttcatt

SEQ ID NO: 2531 - DNA, 19 bp, Artificial Sequence
  Primer
agacaaaagaagcagccca

SEQ ID NO: 2532 - DNA, 20 bp, Artificial Sequence
  Primer
ccaaaaacaaatcgccaacc

SEQ ID NO: 2533 - DNA, 22 bp, Artificial Sequence
  Primer
acacaaactactgaaacagcac

SEQ ID NO: 2534 - DNA, 22 bp, Artificial Sequence
  Primer
gtgtcctttctacattcgtgtc

SEQ ID NO: 2535 - DNA, 20 bp, Artificial Sequence
  Primer
accaaaaacaaatcgccaac

SEQ ID NO: 2536 - DNA, 21 bp, Artificial Sequence
  Primer
cacaaactactgaaacagcac

SEQ ID NO: 2537 - DNA, 21 bp, Artificial Sequence
  Primer
cacaaactactgaaacagcac

SEQ ID NO: 2538 - DNA, 21 bp, Artificial Sequence
  Primer
gagaaccaaaaacaaatcgcc

SEQ ID NO: 2539 - DNA, 21 bp, Artificial Sequence
  Primer
gagaaccaaaaacaaatcgcc

SEQ ID NO: 2540 - DNA, 21 bp, Artificial Sequence
  Primer
cacaaactactgaaacagcac

SEQ ID NO: 2541 - DNA, 21 bp, Artificial Sequence
  Primer
cacaaactactgaaacagcac

SEQ ID NO: 2542 - DNA, 21 bp, Artificial Sequence
  Primer
cacaaactactgaaacagcac

SEQ ID NO: 2543 - DNA, 19 bp, Artificial Sequence
  Primer
tgcctacactgctgctcta

SEQ ID NO: 2544 - DNA, 19 bp, Artificial Sequence
  Primer
tgcctacactgctgctcta

SEQ ID NO: 2545 - DNA, 22 bp, Artificial Sequence
  Primer
tctgcaatcaacagacctcaaa

SEQ ID NO: 2546 - DNA, 21 bp, Artificial Sequence
  Primer
cccaccaacagagcctaaaaa

SEQ ID NO: 2547 - DNA, 21 bp, Artificial Sequence
  Primer
ctgcaatcaacagacctcaaa

SEQ ID NO: 2548 - DNA, 22 bp, Artificial Sequence
  Primer
ctacacaccttccaaactcatt

SEQ ID NO: 2549 - DNA, 21 bp, Artificial Sequence
  Primer
ctgcaatcaacagacctcaaa

SEQ ID NO: 2550 - DNA, 20 bp, Artificial Sequence
  Primer
cccaccaacagagcctaaaa

SEQ ID NO: 2551 - DNA, 22 bp, Artificial Sequence
  Primer
tgatatgattgctgcctacact

SEQ ID NO: 2552 - DNA, 20 bp, Artificial Sequence
  Primer
gttgttgctgctaatgcact

SEQ ID NO: 2553 - DNA, 19 bp, Artificial Sequence
  Primer
cccaccaacagagcctaaa

SEQ ID NO: 2554 - DNA, 20 bp, Artificial Sequence
  Primer
acatttgctacacaccttcc

SEQ ID NO: 2555 - DNA, 21 bp, Artificial Sequence
  Primer
tctgcaatcaacagacctcaa

SEQ ID NO: 2556 - DNA, 19 bp, Artificial Sequence
  Primer
tcccaccaacagagcctaa

SEQ ID NO: 2557 - DNA, 20 bp, Artificial Sequence
  Primer
ctgcaatcaacagacctcaa

SEQ ID NO: 2558 - DNA, 20 bp, Artificial Sequence
  Primer
gataagagctacgagcacca

SEQ ID NO: 2559 - DNA, 20 bp, Artificial Sequence
  Primer
ctgcaatcaacagacctcaa

SEQ ID NO: 2560 - DNA, 20 bp, Artificial Sequence
  Primer
cctgaccctctaaagccaac

SEQ ID NO: 2561 - DNA, 20 bp, Artificial Sequence
  Primer
cctgaccctctaaagccaac

SEQ ID NO: 2562 - DNA, 19 bp, Artificial Sequence
  Primer
cactcaacaaggcaaccaa

SEQ ID NO: 2563 - DNA, 19 bp, Artificial Sequence
  Primer
gtgacttgtgctgcctact

SEQ ID NO: 2564 - DNA, 19 bp, Artificial Sequence
  Primer
cctgaccctctaaagccaa

SEQ ID NO: 2565 - DNA, 18 bp, Artificial Sequence
  Primer
gtttggctcggcttcatt

SEQ ID NO: 2566 - DNA, 20 bp, Artificial Sequence
  Primer
acaaaacattcccaccaaca

SEQ ID NO: 2567 - DNA, 23 bp, Artificial Sequence
  Primer
gcatacaaaacattcccaccaac

SEQ ID NO: 2568 - DNA, 19 bp, Artificial Sequence
  Primer
cctgaccctctaaagccaa

SEQ ID NO: 2569 - DNA, 19 bp, Artificial Sequence
  Primer
cactcaacaaggcaaccaa

SEQ ID NO: 2570 - DNA, 22 bp, Artificial Sequence
  Primer
catacaaaacattcccaccaac

SEQ ID NO: 2571 - DNA, 19 bp, Artificial Sequence
  Primer
cctgaccctctaaagccaa

SEQ ID NO: 2572 - DNA, 20 bp, Artificial Sequence
  Primer
ttacctgaccctctaaagcc

SEQ ID NO: 2573 - DNA, 20 bp, Artificial Sequence
  Primer
ttacctgaccctctaaagcc

SEQ ID NO: 2574 - DNA, 20 bp, Artificial Sequence
  Primer
ttacctgaccctctaaagcc

SEQ ID NO: 2575 - DNA, 21 bp, Artificial Sequence
  Primer
cgcatacaaaacattcccacc

SEQ ID NO: 2576 - DNA, 21 bp, Artificial Sequence
  Primer
cgcatacaaaacattcccacc

SEQ ID NO: 2577 - DNA, 21 bp, Artificial Sequence
  Primer
acgcatacaaaacattcccac

SEQ ID NO: 2578 - DNA, 20 bp, Artificial Sequence
  Primer
gataagagctacgagcacca

SEQ ID NO: 2579 - DNA, 20 bp, Artificial Sequence
  Primer
gataagagctacgagcacca

SEQ ID NO: 2580 - DNA, 21 bp, Artificial Sequence
  Primer
caacatttgctacacaccttc

SEQ ID NO: 2581 - DNA, 21 bp, Artificial Sequence
  Primer
tgacgcatacaaaacattccc

SEQ ID NO: 2582 - DNA, 21 bp, Artificial Sequence
  Primer
caacatttgctacacaccttc

SEQ ID NO: 2583 - DNA, 20 bp, Artificial Sequence
  Primer
acccaacactcaacatctca

SEQ ID NO: 2584 - DNA, 20 bp, Artificial Sequence
  Primer
actgtgctgagagcaatcaa

SEQ ID NO: 2585 - DNA, 20 bp, Artificial Sequence
  Primer
actgtgctgagagcaatcaa

SEQ ID NO: 2586 - DNA, 20 bp, Artificial Sequence
  Primer
gataagagctacgagcacca

SEQ ID NO: 2587 - DNA, 20 bp, Artificial Sequence
  Primer
acaggcacctacacacctca

SEQ ID NO: 2588 - DNA, 21 bp, Artificial Sequence
  Primer
tgccgtagtgtcagtatcatc

SEQ ID NO: 2589 - DNA, 20 bp, Artificial Sequence
  Primer
acaggcacctacacacctca

SEQ ID NO: 2590 - DNA, 20 bp, Artificial Sequence
  Primer
ggcacattaaccaggctaca

SEQ ID NO: 2591 - DNA, 21 bp, Artificial Sequence
  Primer
acattaaccaggctacaacca

SEQ ID NO: 2592 - DNA, 20 bp, Artificial Sequence
  Primer
ccagaacctacacctgaaga

SEQ ID NO: 2593 - DNA, 20 bp, Artificial Sequence
  Primer
ccagaacctacacctgaaga

SEQ ID NO: 2594 - DNA, 22 bp, Artificial Sequence
  Primer
tgaatacacccaaagaccacat

SEQ ID NO: 2595 - DNA, 20 bp, Artificial Sequence
  Primer
cggggaccaagacctaatca

SEQ ID NO: 2596 - DNA, 20 bp, Artificial Sequence
  Primer
tgctacacaccttccaaact

SEQ ID NO: 2597 - DNA, 21 bp, Artificial Sequence
  Primer
agccttgaatacacccaaaga

SEQ ID NO: 2598 - DNA, 19 bp, Artificial Sequence
  Primer
ccaggctacaaccaagaca

SEQ ID NO: 2599 - DNA, 20 bp, Artificial Sequence
  Primer
ggcagtagaagacacacaag

SEQ ID NO: 2600 - DNA, 20 bp, Artificial Sequence
  Primer
tgacataccaggcataccaa

SEQ ID NO: 2601 - DNA, 21 bp, Artificial Sequence
  Primer
gaagacacacaaggaatggac

SEQ ID NO: 2602 - DNA, 20 bp, Artificial Sequence
  Primer
tgacataccaggcataccaa

SEQ ID NO: 2603 - DNA, 20 bp, Artificial Sequence
  Primer
gacacacaaggaatggacaa

SEQ ID NO: 2604 - DNA, 20 bp, Artificial Sequence
  Primer
tgacataccaggcataccaa

SEQ ID NO: 2605 - DNA, 19 bp, Artificial Sequence
  Primer
ccaggaaaagccaaccaac

SEQ ID NO: 2606 - DNA, 22 bp, Artificial Sequence
  Primer
cctaccatacagaaggaagtca

SEQ ID NO: 2607 - DNA, 21 bp, Artificial Sequence
  Primer
caccaaacacagaagattcca

SEQ ID NO: 2608 - DNA, 21 bp, Artificial Sequence
  Primer
agaccaatcaaccctactgac

SEQ ID NO: 2609 - DNA, 19 bp, Artificial Sequence
  Primer
agacatccgctctcccatt

SEQ ID NO: 2610 - DNA, 19 bp, Artificial Sequence
  Primer
ctacccaggaaaagccaac

SEQ ID NO: 2611 - DNA, 18 bp, Artificial Sequence
  Primer
acatccgctctcccattt

SEQ ID NO: 2612 - DNA, 21 bp, Artificial Sequence
  Primer
tgacataccaggcataccaaa

SEQ ID NO: 2613 - DNA, 22 bp, Artificial Sequence
  Primer
tgaggaagaagaagaggaagac

SEQ ID NO: 2614 - DNA, 21 bp, Artificial Sequence
  Primer
tgacataccaggcataccaaa

SEQ ID NO: 2615 - DNA, 21 bp, Artificial Sequence
  Primer
cacattgaccatccaaatcct

SEQ ID NO: 2616 - DNA, 20 bp, Artificial Sequence
  Primer
agaatggaggacgcaatggg

SEQ ID NO: 2617 - DNA, 20 bp, Artificial Sequence
  Primer
agaatggaggacgcaatggg

SEQ ID NO: 2618 - DNA, 19 bp, Artificial Sequence
  Primer
agaatggaggacgcaatgg

SEQ ID NO: 2619 - DNA, 19 bp, Artificial Sequence
  Primer
agaatggaggacgcaatgg

SEQ ID NO: 2620 - DNA, 21 bp, Artificial Sequence
  Primer
tgacataccaggcataccaaa

SEQ ID NO: 2621 - DNA, 21 bp, Artificial Sequence
  Primer
taaccagaatggaggacgcaa

SEQ ID NO: 2622 - DNA, 19 bp, Artificial Sequence
  Primer
accagaatggaggacgcaa

SEQ ID NO: 2623 - DNA, 19 bp, Artificial Sequence
  Primer
gtcttcatcgctcaaagca

SEQ ID NO: 2624 - DNA, 19 bp, Artificial Sequence
  Primer
gtcttcatcgctcaaagca

SEQ ID NO: 2625 - DNA, 19 bp, Artificial Sequence
  Primer
gtcttcatcgctcaaagca

SEQ ID NO: 2626 - DNA, 22 bp, Artificial Sequence
  Primer
tgacataccaggcataccaaag

SEQ ID NO: 2627 - DNA, 20 bp, Artificial Sequence
  Primer
tgacatcgtcaagggtcaaa

SEQ ID NO: 2628 - DNA, 21 bp, Artificial Sequence
  Primer
cataccaggcataccaaagga

SEQ ID NO: 2629 - DNA, 19 bp, Artificial Sequence
  Primer
ggaccccaatcaaaccaac

SEQ ID NO: 2630 - DNA, 19 bp, Artificial Sequence
  Primer
tggaccccaatcaaaccaa

SEQ ID NO: 2631 - DNA, 19 bp, Artificial Sequence
  Primer
tctgaggacaagagggcaa

SEQ ID NO: 2632 - DNA, 19 bp, Artificial Sequence
  Primer
accaggcataccaaaggac

SEQ ID NO: 2633 - DNA, 19 bp, Artificial Sequence
  Primer
tctgaggacaagagggcaa

SEQ ID NO: 2634 - DNA, 21 bp, Artificial Sequence
  Primer
gccaacaacaacaaggccaaa

SEQ ID NO: 2635 - DNA, 21 bp, Artificial Sequence
  Primer
gccaacaacaacaaggccaaa

SEQ ID NO: 2636 - DNA, 19 bp, Artificial Sequence
  Primer
accaggcataccaaaggac

SEQ ID NO: 2637 - DNA, 20 bp, Artificial Sequence
  Primer
ttgctacacaccttccaaac

SEQ ID NO: 2638 - DNA, 20 bp, Artificial Sequence
  Primer
ttgctacacaccttccaaac

SEQ ID NO: 2639 - DNA, 20 bp, Artificial Sequence
  Primer
ttgctacacaccttccaaac

SEQ ID NO: 2640 - DNA, 21 bp, Artificial Sequence
  Primer
ggccaacaacaacaaggccaa

SEQ ID NO: 2641 - DNA, 22 bp, Artificial Sequence
  Primer
tgtagacatggtacatgcgaaa

SEQ ID NO: 2642 - DNA, 20 bp, Artificial Sequence
  Primer
gccaacaacaacaaggccaa

SEQ ID NO: 2643 - DNA, 20 bp, Artificial Sequence
  Primer
ttgctacacaccttccaaac

SEQ ID NO: 2644 - DNA, 19 bp, Artificial Sequence
  Primer
accaggcataccaaaggac

SEQ ID NO: 2645 - DNA, 21 bp, Artificial Sequence
  Primer
ttggactgagactgaccttac

SEQ ID NO: 2646 - DNA, 19 bp, Artificial Sequence
  Primer
tctgaggacaagagggcaa

SEQ ID NO: 2647 - DNA, 21 bp, Artificial Sequence
  Primer
ataccaggcataccaaaggac

SEQ ID NO: 2648 - DNA, 21 bp, Artificial Sequence
  Primer
gtctgcttctaagtctgcttc

SEQ ID NO: 2649 - DNA, 19 bp, Artificial Sequence
  Primer
gggtgtgaccgaaaggtaa

SEQ ID NO: 2650 - DNA, 20 bp, Artificial Sequence
  Primer
gctgtgtgtttgcctatgtt

SEQ ID NO: 2651 - DNA, 23 bp, Artificial Sequence
  Primer
acataccaggcataccaaaggac

SEQ ID NO: 2652 - DNA, 20 bp, Artificial Sequence
  Primer
gcaagggaggtaggactaga

SEQ ID NO: 2653 - DNA, 19 bp, Artificial Sequence
  Primer
ttctacgcagagggaagca

SEQ ID NO: 2654 - DNA, 20 bp, Artificial Sequence
  Primer
tgccgtgaccatgagcatga

SEQ ID NO: 2655 - DNA, 22 bp, Artificial Sequence
  Primer
acataccaggcataccaaagga

SEQ ID NO: 2656 - DNA, 20 bp, Artificial Sequence
  Primer
tgccgtgaccatgagcatga

SEQ ID NO: 2657 - DNA, 21 bp, Artificial Sequence
  Primer
tgttccttttaccctccagat

SEQ ID NO: 2658 - DNA, 21 bp, Artificial Sequence
  Primer
cataccaggcataccaaagga

SEQ ID NO: 2659 - DNA, 21 bp, Artificial Sequence
  Primer
cataccaggcataccaaagga

SEQ ID NO: 2660 - DNA, 20 bp, Artificial Sequence
  Primer
acttgtgctgcctactactt

SEQ ID NO: 2661 - DNA, 21 bp, Artificial Sequence
  Primer
gctatctgtcacattcttccc

SEQ ID NO: 2662 - DNA, 19 bp, Artificial Sequence
  Primer
ccgtgaccatgagcatgaa

SEQ ID NO: 2663 - DNA, 19 bp, Artificial Sequence
  Primer
ccgtgaccatgagcatgaa

SEQ ID NO: 2664 - DNA, 21 bp, Artificial Sequence
  Primer
gctatctgtcacattcttccc

SEQ ID NO: 2665 - DNA, 19 bp, Artificial Sequence
  Primer
ccgtgaccatgagcatgaa

SEQ ID NO: 2666 - DNA, 19 bp, Artificial Sequence
  Primer
ccgtgaccatgagcatgaa

SEQ ID NO: 2667 - DNA, 21 bp, Artificial Sequence
  Primer
ccacattgaccatccaaatcc

SEQ ID NO: 2668 - DNA, 21 bp, Artificial Sequence
  Primer
ccacattgaccatccaaatcc

SEQ ID NO: 2669 - DNA, 19 bp, Artificial Sequence
  Primer
ccgtgaccatgagcatgaa

SEQ ID NO: 2670 - DNA, 21 bp, Artificial Sequence
  Primer
gctatctgtcacattcttccc

SEQ ID NO: 2671 - DNA, 21 bp, Artificial Sequence
  Primer
gctatctgtcacattcttccc

SEQ ID NO: 2672 - DNA, 21 bp, Artificial Sequence
  Primer
gctatctgtcacattcttccc

SEQ ID NO: 2673 - DNA, 19 bp, Artificial Sequence
  Primer
caaccatgttgttgctgct

SEQ ID NO: 2674 - DNA, 19 bp, Artificial Sequence
  Primer
cgtgaccatgagcatgaaa

SEQ ID NO: 2675 - DNA, 21 bp, Artificial Sequence
  Primer
ggtacatgcgaaaggtcagaa

SEQ ID NO: 2676 - DNA, 21 bp, Artificial Sequence
  Primer
ggtacatgcgaaaggtcagaa

SEQ ID NO: 2677 - DNA, 19 bp, Artificial Sequence
  Primer
cgtgaccatgagcatgaaa

SEQ ID NO: 2678 - DNA, 25 bp, Artificial Sequence
  Primer
gagtacaaagccagtagatacttca

SEQ ID NO: 2679 - DNA, 20 bp, Artificial Sequence
  Primer
accacaacactggaagaaac

SEQ ID NO: 2680 - DNA, 23 bp, Artificial Sequence
  Primer
gaggttaccacaacactggaaga

SEQ ID NO: 2681 - DNA, 20 bp, Artificial Sequence
  Primer
gaggttaccacaacactgga

SEQ ID NO: 2682 - DNA, 21 bp, Artificial Sequence
  Primer
ggtacatgcgaaaggtcagaa

SEQ ID NO: 2683 - DNA, 19 bp, Artificial Sequence
  Primer
cgtgaccatgagcatgaaa

SEQ ID NO: 2684 - DNA, 19 bp, Artificial Sequence
  Primer
cgtgaccatgagcatgaaa

SEQ ID NO: 2685 - DNA, 20 bp, Artificial Sequence
  Primer
gtgaaagtcaacaacccacc

SEQ ID NO: 2686 - DNA, 20 bp, Artificial Sequence
  Primer
gttgttgctgctaatgcact

SEQ ID NO: 2687 - DNA, 19 bp, Artificial Sequence
  Primer
cgtgaccatgagcatgaaa

SEQ ID NO: 2688 - DNA, 20 bp, Artificial Sequence
  Primer
ggaggacaaccaatcaccaa

SEQ ID NO: 2689 - DNA, 22 bp, Artificial Sequence
  Primer
ccaccaaacacagaagattcca

SEQ ID NO: 2690 - DNA, 20 bp, Artificial Sequence
  Primer
gataagagctacgagcacca

SEQ ID NO: 2691 - DNA, 20 bp, Artificial Sequence
  Primer
ggaggacaaccaatcaccaa

SEQ ID NO: 2692 - DNA, 21 bp, Artificial Sequence
  Primer
agaccaatcaaccctactgac

SEQ ID NO: 2693 - DNA, 21 bp, Artificial Sequence
  Primer
agaccaatcaaccctactgac

SEQ ID NO: 2694 - DNA, 20 bp, Artificial Sequence
  Primer
gatgaggaagaagaggacga

SEQ ID NO: 2695 - DNA, 20 bp, Artificial Sequence
  Primer
gtacatgcgaaaggtcagaa

SEQ ID NO: 2696 - DNA, 21 bp, Artificial Sequence
  Primer
ccaccaaacacagaagattcc

SEQ ID NO: 2697 - DNA, 21 bp, Artificial Sequence
  Primer
ccaccaaacacagaagattcc

SEQ ID NO: 2698 - DNA, 21 bp, Artificial Sequence
  Primer
ccaccaaacacagaagattcc

SEQ ID NO: 2699 - DNA, 20 bp, Artificial Sequence
  Primer
accaatcaaccctactgacc

SEQ ID NO: 2700 - DNA, 22 bp, Artificial Sequence
  Primer
tcctacacaggcacctacacac

SEQ ID NO: 2701 - DNA, 20 bp, Artificial Sequence
  Primer
ctacacaggcacctacacac

SEQ ID NO: 2702 - DNA, 20 bp, Artificial Sequence
  Primer
ctacacaggcacctacacac

SEQ ID NO: 2703 - DNA, 21 bp, Artificial Sequence
  Primer
cacattgaccatccaaatcct

SEQ ID NO: 2704 - DNA, 20 bp, Artificial Sequence
  Primer
gttctctaccaaccaccaca

SEQ ID NO: 2705 - DNA, 20 bp, Artificial Sequence
  Primer
accaatcaaccctactgacc

SEQ ID NO: 2706 - DNA, 21 bp, Artificial Sequence
  Primer
cacattgaccatccaaatcct

SEQ ID NO: 2707 - DNA, 19 bp, Artificial Sequence
  Primer
tacacaggcacctacacac

SEQ ID NO: 2708 - DNA, 19 bp, Artificial Sequence
  Primer
tacacaggcacctacacac

SEQ ID NO: 2709 - DNA, 19 bp, Artificial Sequence
  Primer
tacacaggcacctacacac

SEQ ID NO: 2710 - DNA, 23 bp, Artificial Sequence
  Primer
caaaagacctatgagagacatcc

SEQ ID NO: 2711 - DNA, 20 bp, Artificial Sequence
  Primer
gtacatgcgaaaggtcagaa

SEQ ID NO: 2712 - DNA, 19 bp, Artificial Sequence
  Primer
agacatccgctctcccatt

SEQ ID NO: 2713 - DNA, 19 bp, Artificial Sequence
  Primer
aagagctacgagcaccaga

SEQ ID NO: 2714 - DNA, 21 bp, Artificial Sequence
  Primer
cacattgaccatccaaatcct

SEQ ID NO: 2715 - DNA, 21 bp, Artificial Sequence
  Primer
caccacagacatcaatcactt

SEQ ID NO: 2716 - DNA, 24 bp, Artificial Sequence
  Primer
gataagagctacgagcaccagaca

SEQ ID NO: 2717 - DNA, 19 bp, Artificial Sequence
  Primer
gcaagtggaggacaaccaa

SEQ ID NO: 2718 - DNA, 20 bp, Artificial Sequence
  Primer
tgctttccttctgtgctttt

SEQ ID NO: 2719 - DNA, 20 bp, Artificial Sequence
  Primer
tgctttccttctgtgctttt

SEQ ID NO: 2720 - DNA, 22 bp, Artificial Sequence
  Primer
ctctgtctacactgttgaatcc

SEQ ID NO: 2721 - DNA, 22 bp, Artificial Sequence
  Primer
catcctacacaggcacctacac

SEQ ID NO: 2722 - DNA, 20 bp, Artificial Sequence
  Primer
gtgctttccttctgtgcttt

SEQ ID NO: 2723 - DNA, 19 bp, Artificial Sequence
  Primer
tcaaaggggaatgcccaaa

SEQ ID NO: 2724 - DNA, 20 bp, Artificial Sequence
  Primer
gtgctttccttctgtgcttt

SEQ ID NO: 2725 - DNA, 19 bp, Artificial Sequence
  Primer
gtgctttccttctgtgctt

SEQ ID NO: 2726 - DNA, 19 bp, Artificial Sequence
  Primer
gtgctttccttctgtgctt

SEQ ID NO: 2727 - DNA, 20 bp, Artificial Sequence
  Primer
tcctacacaggcacctacac

SEQ ID NO: 2728 - DNA, 20 bp, Artificial Sequence
  Primer
tcctacacaggcacctacac

SEQ ID NO: 2729 - DNA, 20 bp, Artificial Sequence
  Primer
tcctacacaggcacctacac

SEQ ID NO: 2730 - DNA, 20 bp, Artificial Sequence
  Primer
gtacatgcgaaaggtcagaa

SEQ ID NO: 2731 - DNA, 21 bp, Artificial Sequence
  Primer
acccaggaaaagccaaccaac

SEQ ID NO: 2732 - DNA, 19 bp, Artificial Sequence
  Primer
gcctctcttgttcttgctc

SEQ ID NO: 2733 - DNA, 19 bp, Artificial Sequence
  Primer
gcctctcttgttcttgctc

SEQ ID NO: 2734 - DNA, 21 bp, Artificial Sequence
  Primer
ccaattcaactgtgctttcct

SEQ ID NO: 2735 - DNA, 19 bp, Artificial Sequence
  Primer
tgctgccaagaagaacaac

SEQ ID NO: 2736 - DNA, 19 bp, Artificial Sequence
  Primer
ctgccaattcaactgtgct

SEQ ID NO: 2737 - DNA, 20 bp, Artificial Sequence
  Primer
aggctggaaatgctacagaa

SEQ ID NO: 2738 - DNA, 22 bp, Artificial Sequence
  Primer
gctacaaacaatgtctttcgct

SEQ ID NO: 2739 - DNA, 22 bp, Artificial Sequence
  Primer
gctacaaacaatgtctttcgct

SEQ ID NO: 2740 - DNA, 19 bp, Artificial Sequence
  Primer
aggctggaaatgctacaga

SEQ ID NO: 2741 - DNA, 21 bp, Artificial Sequence
  Primer
acaactcctggaacaatggaa

SEQ ID NO: 2742 - DNA, 23 bp, Artificial Sequence
  Primer
cttcatcctacacaggcacctac

SEQ ID NO: 2743 - DNA, 21 bp, Artificial Sequence
  Primer
acaactcctggaacaatggaa

SEQ ID NO: 2744 - DNA, 20 bp, Artificial Sequence
  Primer
gcagagtgtgaggaagaaga

SEQ ID NO: 2745 - DNA, 21 bp, Artificial Sequence
  Primer
gtctgcttctaagtctgcttc

SEQ ID NO: 2746 - DNA, 21 bp, Artificial Sequence
  Primer
acaactcctggaacaatggaa

SEQ ID NO: 2747 - DNA, 21 bp, Artificial Sequence
  Primer
gtagacatggtacatgcgaaa

SEQ ID NO: 2748 - DNA, 18 bp, Artificial Sequence
  Primer
ggcgacatttcaggcatt

SEQ ID NO: 2749 - DNA, 18 bp, Artificial Sequence
  Primer
ggcgacatttcaggcatt

SEQ ID NO: 2750 - DNA, 22 bp, Artificial Sequence
  Primer
tgtagacatggtacatgcgaaa

SEQ ID NO: 2751 - DNA, 22 bp, Artificial Sequence
  Primer
tgtagacatggtacatgcgaaa

SEQ ID NO: 2752 - DNA, 21 bp, Artificial Sequence
  Primer
tgccaagaagaacaacatacc

SEQ ID NO: 2753 - DNA, 21 bp, Artificial Sequence
  Primer
ctattgttgctgctgctactt

SEQ ID NO: 2754 - DNA, 22 bp, Artificial Sequence
  Primer
gctattgttgctgctgctactt

SEQ ID NO: 2755 - DNA, 19 bp, Artificial Sequence
  Primer
gtcttcatcgctcaaagca

SEQ ID NO: 2756 - DNA, 19 bp, Artificial Sequence
  Primer
gtcttcatcgctcaaagca

SEQ ID NO: 2757 - DNA, 20 bp, Artificial Sequence
  Primer
attgttgctgctgctacttt

SEQ ID NO: 2758 - DNA, 22 bp, Artificial Sequence
  Primer
atgatgagccgacgacgactac

SEQ ID NO: 2759 - DNA, 22 bp, Artificial Sequence
  Primer
ctattgttgctgctgctacttt

SEQ ID NO: 2760 - DNA, 19 bp, Artificial Sequence
  Primer
tccgctctcccattttgtc

SEQ ID NO: 2761 - DNA, 22 bp, Artificial Sequence
  Primer
atgatgagccgacgacgactac

SEQ ID NO: 2762 - DNA, 21 bp, Artificial Sequence
  Primer
catcgtcaagggtcaaataca

SEQ ID NO: 2763 - DNA, 20 bp, Artificial Sequence
  Primer
tgacatcgtcaagggtcaaa

SEQ ID NO: 2764 - DNA, 20 bp, Artificial Sequence
  Primer
ctattgttgctgctgctact

SEQ ID NO: 2765 - DNA, 22 bp, Artificial Sequence
  Primer
gctaccaccttatgtccttccc

SEQ ID NO: 2766 - DNA, 19 bp, Artificial Sequence
  Primer
ctgaggacaagagggcaaa

SEQ ID NO: 2767 - DNA, 19 bp, Artificial Sequence
  Primer
ctgaggacaagagggcaaa

SEQ ID NO: 2768 - DNA, 19 bp, Artificial Sequence
  Primer
accaccttatgtccttccc

SEQ ID NO: 2769 - DNA, 20 bp, Artificial Sequence
  Primer
caaccaccacagacatcaat

SEQ ID NO: 2770 - DNA, 19 bp, Artificial Sequence
  Primer
accaccttatgtccttccc

SEQ ID NO: 2771 - DNA, 19 bp, Artificial Sequence
  Primer
accaccttatgtccttccc

SEQ ID NO: 2772 - DNA, 19 bp, Artificial Sequence
  Primer
acaagaggagccaccaaac

SEQ ID NO: 2773 - DNA, 20 bp, Artificial Sequence
  Primer
tatgatgagccgacgacgac

SEQ ID NO: 2774 - DNA, 20 bp, Artificial Sequence
  Primer
tatgatgagccgacgacgac

SEQ ID NO: 2775 - DNA, 19 bp, Artificial Sequence
  Primer
acaagaggagccaccaaac

SEQ ID NO: 2776 - DNA, 21 bp, Artificial Sequence
  Primer
gctaccaccttatgtccttcc

SEQ ID NO: 2777 - DNA, 19 bp, Artificial Sequence
  Primer
gaggacaagagggcaaaag

SEQ ID NO: 2778 - DNA, 21 bp, Artificial Sequence
  Primer
gctaccaccttatgtccttcc

SEQ ID NO: 2779 - DNA, 21 bp, Artificial Sequence
  Primer
gctaccaccttatgtccttcc

SEQ ID NO: 2780 - DNA, 19 bp, Artificial Sequence
  Primer
gcactctttccgaacaact

SEQ ID NO: 2781 - DNA, 20 bp, Artificial Sequence
  Primer
ggctaccaccttatgtcctt

SEQ ID NO: 2782 - DNA, 20 bp, Artificial Sequence
  Primer
tatgatgagccgacgacgac

SEQ ID NO: 2783 - DNA, 20 bp, Artificial Sequence
  Primer
tgctacacaccttccaaact

SEQ ID NO: 2784 - DNA, 19 bp, Artificial Sequence
  Primer
atccgctctcccattttgt

SEQ ID NO: 2785 - DNA, 21 bp, Artificial Sequence
  Primer
cacattgaccatccaaatcct

SEQ ID NO: 2786 - DNA, 19 bp, Artificial Sequence
  Primer
gcactctttccgaacaact

SEQ ID NO: 2787 - DNA, 20 bp, Artificial Sequence
  Primer
ccaagggaaagcccgtaaaa

SEQ ID NO: 2788 - DNA, 19 bp, Artificial Sequence
  Primer
gaggacaagagggcaaaag

SEQ ID NO: 2789 - DNA, 19 bp, Artificial Sequence
  Primer
ccaagggaaagcccgtaaa

SEQ ID NO: 2790 - DNA, 19 bp, Artificial Sequence
  Primer
gcactctttccgaacaact

SEQ ID NO: 2791 - DNA, 19 bp, Artificial Sequence
  Primer
accaagggaaagcccgtaa

SEQ ID NO: 2792 - DNA, 19 bp, Artificial Sequence
  Primer
gcactctttccgaacaact

SEQ ID NO: 2793 - DNA, 19 bp, Artificial Sequence
  Primer
aagaggagccaccaaacac

SEQ ID NO: 2794 - DNA, 20 bp, Artificial Sequence
  Primer
ctcttgtaatgtcaaccgct

SEQ ID NO: 2795 - DNA, 19 bp, Artificial Sequence
  Primer
aagaggagccaccaaacac

SEQ ID NO: 2796 - DNA, 20 bp, Artificial Sequence
  Primer
ggctatcacaagggcaaaaa

SEQ ID NO: 2797 - DNA, 20 bp, Artificial Sequence
  Primer
ggctatcacaagggcaaaaa

SEQ ID NO: 2798 - DNA, 20 bp, Artificial Sequence
  Primer
ccaaccaccacagacatcaa

SEQ ID NO: 2799 - DNA, 20 bp, Artificial Sequence
  Primer
atccaaaatgtgacagagcc

SEQ ID NO: 2800 - DNA, 21 bp, Artificial Sequence
  Primer
gcacctacgcagtataaacaa

SEQ ID NO: 2801 - DNA, 20 bp, Artificial Sequence
  Primer
gtcttcatcctacacaggca

SEQ ID NO: 2802 - DNA, 21 bp, Artificial Sequence
  Primer
agacttcaaagccttcaaacc

SEQ ID NO: 2803 - DNA, 21 bp, Artificial Sequence
  Primer
agacttcaaagccttcaaacc

SEQ ID NO: 2804 - DNA, 21 bp, Artificial Sequence
  Primer
gcacctacgcagtataaacaa

SEQ ID NO: 2805 - DNA, 18 bp, Artificial Sequence
  Primer
gctattgttgctgctgct

SEQ ID NO: 2806 - DNA, 21 bp, Artificial Sequence
  Primer
gcacctacgcagtataaacaa

SEQ ID NO: 2807 - DNA, 20 bp, Artificial Sequence
  Primer
atccaaaatgtgacagagcc

SEQ ID NO: 2808 - DNA, 19 bp, Artificial Sequence
  Primer
gcctctcttgttcttgctc

SEQ ID NO: 2809 - DNA, 19 bp, Artificial Sequence
  Primer
actacagcagccaaactca

SEQ ID NO: 2810 - DNA, 20 bp, Artificial Sequence
  Primer
catcctacacaggcacctac

SEQ ID NO: 2811 - DNA, 20 bp, Artificial Sequence
  Primer
catcctacacaggcacctac

SEQ ID NO: 2812 - DNA, 20 bp, Artificial Sequence
  Primer
catcctacacaggcacctac

SEQ ID NO: 2813 - DNA, 20 bp, Artificial Sequence
  Primer
catcctacacaggcacctac

SEQ ID NO: 2814 - DNA, 20 bp, Artificial Sequence
  Primer
ggcagacttcaaagccttca

SEQ ID NO: 2815 - DNA, 22 bp, Artificial Sequence
  Primer
ctaaccctaagacacccaagta

SEQ ID NO: 2816 - DNA, 20 bp, Artificial Sequence
  Primer
atgtcctgcctgtcaagacc

SEQ ID NO: 2817 - DNA, 20 bp, Artificial Sequence
  Primer
atgtcctgcctgtcaagacc

SEQ ID NO: 2818 - DNA, 20 bp, Artificial Sequence
  Primer
atgtcctgcctgtcaagacc

SEQ ID NO: 2819 - DNA, 19 bp, Artificial Sequence
  Primer
gcagacttcaaagccttca

SEQ ID NO: 2820 - DNA, 21 bp, Artificial Sequence
  Primer
tcatcctacacaggcacctac

SEQ ID NO: 2821 - DNA, 19 bp, Artificial Sequence
  Primer
acaagcctcactccctttc

SEQ ID NO: 2822 - DNA, 21 bp, Artificial Sequence
  Primer
gtagacatggtacatgcgaaa

SEQ ID NO: 2823 - DNA, 21 bp, Artificial Sequence
  Primer
gtagacatggtacatgcgaaa

SEQ ID NO: 2824 - DNA, 20 bp, Artificial Sequence
  Primer
agtcgaggcggaggtacaaa

SEQ ID NO: 2825 - DNA, 19 bp, Artificial Sequence
  Primer
aagagaagccccagcacat

SEQ ID NO: 2826 - DNA, 21 bp, Artificial Sequence
  Primer
gcagagtgtgaggaagaagaa

SEQ ID NO: 2827 - DNA, 21 bp, Artificial Sequence
  Primer
gcagagtgtgaggaagaagaa

SEQ ID NO: 2828 - DNA, 22 bp, Artificial Sequence
  Primer
gcagagtgtgaggaagaagaaa

SEQ ID NO: 2829 - DNA, 20 bp, Artificial Sequence
  Primer
aagtcgaggcggaggtacaa

SEQ ID NO: 2830 - DNA, 20 bp, Artificial Sequence
  Primer
tgccaacctattctgttgct

SEQ ID NO: 2831 - DNA, 22 bp, Artificial Sequence
  Primer
gcagagtgtgaggaagaagaaa

SEQ ID NO: 2832 - DNA, 21 bp, Artificial Sequence
  Primer
tgtagacatggtacatgcgaa

SEQ ID NO: 2833 - DNA, 21 bp, Artificial Sequence
  Primer
tgtagacatggtacatgcgaa

SEQ ID NO: 2834 - DNA, 20 bp, Artificial Sequence
  Primer
actgtgctgagagcaatcaa

SEQ ID NO: 2835 - DNA, 20 bp, Artificial Sequence
  Primer
actgtgctgagagcaatcaa

SEQ ID NO: 2836 - DNA, 21 bp, Artificial Sequence
  Primer
tgtagacatggtacatgcgaa

SEQ ID NO: 2837 - DNA, 21 bp, Artificial Sequence
  Primer
tgtagacatggtacatgcgaa

SEQ ID NO: 2838 - DNA, 22 bp, Artificial Sequence
  Primer
ccaaaaacaaatcgccaaccaa

SEQ ID NO: 2839 - DNA, 21 bp, Artificial Sequence
  Primer
tgccgtagtgtcagtatcatc

SEQ ID NO: 2840 - DNA, 21 bp, Artificial Sequence
  Primer
tgtagacatggtacatgcgaa

SEQ ID NO: 2841 - DNA, 20 bp, Artificial Sequence
  Primer
acgcatacaaaacattccca

SEQ ID NO: 2842 - DNA, 19 bp, Artificial Sequence
  Primer
agcaacgataccgctacaa

SEQ ID NO: 2843 - DNA, 22 bp, Artificial Sequence
  Primer
ccaaaaacaaatcgccaaccaa

SEQ ID NO: 2844 - DNA, 20 bp, Artificial Sequence
  Primer
actgtgctgagagcaatcaa

SEQ ID NO: 2845 - DNA, 20 bp, Artificial Sequence
  Primer
cacctactctagtgccacaa

SEQ ID NO: 2846 - DNA, 20 bp, Artificial Sequence
  Primer
gctcaaagccactgaggaaa

SEQ ID NO: 2847 - DNA, 20 bp, Artificial Sequence
  Primer
gctcaaagccactgaggaaa

SEQ ID NO: 2848 - DNA, 20 bp, Artificial Sequence
  Primer
gctcaaagccactgaggaaa

SEQ ID NO: 2849 - DNA, 21 bp, Artificial Sequence
  Primer
tgaacatgagtacggtacaga

SEQ ID NO: 2850 - DNA, 19 bp, Artificial Sequence
  Primer
gctcaaagccactgaggaa

SEQ ID NO: 2851 - DNA, 19 bp, Artificial Sequence
  Primer
gctcaaagccactgaggaa

SEQ ID NO: 2852 - DNA, 21 bp, Artificial Sequence
  Primer
accaaaaacaaatcgccaacc

SEQ ID NO: 2853 - DNA, 19 bp, Artificial Sequence
  Primer
gctcaaagccactgaggaa

SEQ ID NO: 2854 - DNA, 20 bp, Artificial Sequence
  Primer
ccaaaaacaaatcgccaacc

SEQ ID NO: 2855 - DNA, 20 bp, Artificial Sequence
  Primer
ccaaaaacaaatcgccaacc

SEQ ID NO: 2856 - DNA, 21 bp, Artificial Sequence
  Primer
tgaacatgagtacggtacaga

SEQ ID NO: 2857 - DNA, 22 bp, Artificial Sequence
  Primer
gtgaacatgagtacggtacaga

SEQ ID NO: 2858 - DNA, 21 bp, Artificial Sequence
  Primer
gagacaaaagaagcagcccac

SEQ ID NO: 2859 - DNA, 20 bp, Artificial Sequence
  Primer
actgtgctgagagcaatcaa

SEQ ID NO: 2860 - DNA, 22 bp, Artificial Sequence
  Primer
gaaccaaaaacaaatcgccaac

SEQ ID NO: 2861 - DNA, 19 bp, Artificial Sequence
  Primer
gagacaaaagaagcagccc

SEQ ID NO: 2862 - DNA, 20 bp, Artificial Sequence
  Primer
cagagacaaaagaagcagcc

SEQ ID NO: 2863 - DNA, 21 bp, Artificial Sequence
  Primer
tgctgatgttctctaccaacc

SEQ ID NO: 2864 - DNA, 21 bp, Artificial Sequence
  Primer
ggatacctcacttcgtcatca

SEQ ID NO: 2865 - DNA, 20 bp, Artificial Sequence
  Primer
accaaaaacaaatcgccaac

SEQ ID NO: 2866 - DNA, 19 bp, Artificial Sequence
  Primer
ctcttctcgctcctcatca

SEQ ID NO: 2867 - DNA, 19 bp, Artificial Sequence
  Primer
ctcttctcgctcctcatca

SEQ ID NO: 2868 - DNA, 20 bp, Artificial Sequence
  Primer
cctcttctcgctcctcatca

SEQ ID NO: 2869 - DNA, 21 bp, Artificial Sequence
  Primer
ttggactgagactgaccttac

SEQ ID NO: 2870 - DNA, 20 bp, Artificial Sequence
  Primer
accaaaaacaaatcgccaac

SEQ ID NO: 2871 - DNA, 21 bp, Artificial Sequence
  Primer
gactacaaaagagaagcccca

SEQ ID NO: 2872 - DNA, 20 bp, Artificial Sequence
  Primer
tgctacacaccttccaaact

SEQ ID NO: 2873 - DNA, 23 bp, Artificial Sequence
  Primer
gcttacccacttacaaaacatcc

SEQ ID NO: 2874 - DNA, 22 bp, Artificial Sequence
  Primer
gagaaccaaaaacaaatcgcca

SEQ ID NO: 2875 - DNA, 20 bp, Artificial Sequence
  Primer
tgctacacaccttccaaact

SEQ ID NO: 2876 - DNA, 23 bp, Artificial Sequence
  Primer
gcttacccacttacaaaacatcc

SEQ ID NO: 2877 - DNA, 24 bp, Artificial Sequence
  Primer
gcttacccacttacaaaacatcct

SEQ ID NO: 2878 - DNA, 20 bp, Artificial Sequence
  Primer
cacacactttgcttttgctt

SEQ ID NO: 2879 - DNA, 25 bp, Artificial Sequence
  Primer
ctataacagtaactatgcggctcaa

SEQ ID NO: 2880 - DNA, 20 bp, Artificial Sequence
  Primer
tgctacacaccttccaaact

SEQ ID NO: 2881 - DNA, 20 bp, Artificial Sequence
  Primer
tgctacacaccttccaaact

SEQ ID NO: 2882 - DNA, 20 bp, Artificial Sequence
  Primer
tgctacacaccttccaaact

SEQ ID NO: 2883 - DNA, 20 bp, Artificial Sequence
  Primer
tgctgctaacatacacctga

SEQ ID NO: 2884 - DNA, 20 bp, Artificial Sequence
  Primer
tgctacacaccttccaaact

SEQ ID NO: 2885 - DNA, 19 bp, Artificial Sequence
  Primer
ccaggcataccaaaggaca

SEQ ID NO: 2886 - DNA, 20 bp, Artificial Sequence
  Primer
ttgctacacaccttccaaac

SEQ ID NO: 2887 - DNA, 19 bp, Artificial Sequence
  Primer
ccaggcataccaaaggaca

SEQ ID NO: 2888 - DNA, 19 bp, Artificial Sequence
  Primer
ccaggcataccaaaggaca

SEQ ID NO: 2889 - DNA, 19 bp, Artificial Sequence
  Primer
ggaccccaatcaaaccaac

SEQ ID NO: 2890 - DNA, 20 bp, Artificial Sequence
  Primer
tgctacacaccttccaaact

SEQ ID NO: 2891 - DNA, 25 bp, Artificial Sequence
  Primer
ggttccatcatacagtttcctaaca

SEQ ID NO: 2892 - DNA, 21 bp, Artificial Sequence
  Primer
gcactcaacaaggcaaccaat

SEQ ID NO: 2893 - DNA, 20 bp, Artificial Sequence
  Primer
tctgctgctgaggcatctaa

SEQ ID NO: 2894 - DNA, 22 bp, Artificial Sequence
  Primer
tgagaaccaaaaacaaatcgcc

SEQ ID NO: 2895 - DNA, 20 bp, Artificial Sequence
  Primer
catgagtacggtacagagga

SEQ ID NO: 2896 - DNA, 21 bp, Artificial Sequence
  Primer
gagaaccaaaaacaaatcgcc

SEQ ID NO: 2897 - DNA, 20 bp, Artificial Sequence
  Primer
ctgctgctgaggcatctaaa

SEQ ID NO: 2898 - DNA, 21 bp, Artificial Sequence
  Primer
gagaaccaaaaacaaatcgcc

SEQ ID NO: 2899 - DNA, 20 bp, Artificial Sequence
  Primer
tgctgctgaggcatctaaaa

SEQ ID NO: 2900 - DNA, 20 bp, Artificial Sequence
  Primer
gcaacatttgctacacacct

SEQ ID NO: 2901 - DNA, 19 bp, Artificial Sequence
  Primer
agcagaaacgctcaaagcc

SEQ ID NO: 2902 - DNA, 23 bp, Artificial Sequence
  Primer
ccaccaacagagcctaaaaagga

SEQ ID NO: 2903 - DNA, 22 bp, Artificial Sequence
  Primer
caccaacagagcctaaaaagga

SEQ ID NO: 2904 - DNA, 21 bp, Artificial Sequence
  Primer
tgctgctgaggcatctaaaaa

SEQ ID NO: 2905 - DNA, 21 bp, Artificial Sequence
  Primer
accaacagagcctaaaaagga

SEQ ID NO: 2906 - DNA, 20 bp, Artificial Sequence
  Primer
catgagtacggtacagagga

SEQ ID NO: 2907 - DNA, 20 bp, Artificial Sequence
  Primer
agccagaaccagaacctaca

SEQ ID NO: 2908 - DNA, 22 bp, Artificial Sequence
  Primer
tcccaccaacagagcctaaaaa

SEQ ID NO: 2909 - DNA, 19 bp, Artificial Sequence
  Primer
gcatctaaaaagcctcgcc

SEQ ID NO: 2910 - DNA, 21 bp, Artificial Sequence
  Primer
cccaccaacagagcctaaaaa

SEQ ID NO: 2911 - DNA, 20 bp, Artificial Sequence
  Primer
gcatctaaaaagcctcgcca

SEQ ID NO: 2912 - DNA, 21 bp, Artificial Sequence
  Primer
acatgagtacggtacagagga

SEQ ID NO: 2913 - DNA, 19 bp, Artificial Sequence
  Primer
gccagaaccagaacctaca

SEQ ID NO: 2914 - DNA, 19 bp, Artificial Sequence
  Primer
gccagaaccagaacctaca

SEQ ID NO: 2915 - DNA, 20 bp, Artificial Sequence
  Primer
gcatctaaaaagcctcgcca

SEQ ID NO: 2916 - DNA, 19 bp, Artificial Sequence
  Primer
gagccagaaccagaaccta

SEQ ID NO: 2917 - DNA, 20 bp, Artificial Sequence
  Primer
gcatctaaaaagcctcgcca

SEQ ID NO: 2918 - DNA, 20 bp, Artificial Sequence
  Primer
ctgcctacactgctgctcta

SEQ ID NO: 2919 - DNA, 19 bp, Artificial Sequence
  Primer
ttgagccagaaccagaacc

SEQ ID NO: 2920 - DNA, 20 bp, Artificial Sequence
  Primer
accaggcataccaaaggaca

SEQ ID NO: 2921 - DNA, 22 bp, Artificial Sequence
  Primer
atgagtacggtacagaggatga

SEQ ID NO: 2922 - DNA, 20 bp, Artificial Sequence
  Primer
accaggcataccaaaggaca

SEQ ID NO: 2923 - DNA, 20 bp, Artificial Sequence
  Primer
catctaaaaagcctcgccaa

SEQ ID NO: 2924 - DNA, 21 bp, Artificial Sequence
  Primer
agattgagccagaaccagaac

SEQ ID NO: 2925 - DNA, 20 bp, Artificial Sequence
  Primer
gctacacaccttccaaactc

SEQ ID NO: 2926 - DNA, 21 bp, Artificial Sequence
  Primer
gcatctaaaaagcctcgccaa

SEQ ID NO: 2927 - DNA, 20 bp, Artificial Sequence
  Primer
agattgagccagaaccagaa

SEQ ID NO: 2928 - DNA, 21 bp, Artificial Sequence
  Primer
tcccaccaacagagcctaaaa

SEQ ID NO: 2929 - DNA, 20 bp, Artificial Sequence
  Primer
cccaccaacagagcctaaaa

SEQ ID NO: 2930 - DNA, 20 bp, Artificial Sequence
  Primer
agattgagccagaaccagaa

SEQ ID NO: 2931 - DNA, 20 bp, Artificial Sequence
  Primer
gctacacaccttccaaactc

SEQ ID NO: 2932 - DNA, 21 bp, Artificial Sequence
  Primer
catctaaaaagcctcgccaaa

SEQ ID NO: 2933 - DNA, 20 bp, Artificial Sequence
  Primer
gctacacaccttccaaactc

SEQ ID NO: 2934 - DNA, 22 bp, Artificial Sequence
  Primer
gcatctaaaaagcctcgccaaa

SEQ ID NO: 2935 - DNA, 20 bp, Artificial Sequence
  Primer
atggtagagtggaaggacag

SEQ ID NO: 2936 - DNA, 18 bp, Artificial Sequence
  Primer
gcagcagaaacgctcaaa

SEQ ID NO: 2937 - DNA, 20 bp, Artificial Sequence
  Primer
acatttgctacacaccttcc

SEQ ID NO: 2938 - DNA, 20 bp, Artificial Sequence
  Primer
aagtcacataagcctcccat

SEQ ID NO: 2939 - DNA, 20 bp, Artificial Sequence
  Primer
gcagagtgtgaggaagaaga

SEQ ID NO: 2940 - DNA, 20 bp, Artificial Sequence
  Primer
gagattgagccagaaccaga

SEQ ID NO: 2941 - DNA, 22 bp, Artificial Sequence
  Primer
catctaaaaagcctcgccaaaa

SEQ ID NO: 2942 - DNA, 23 bp, Artificial Sequence
  Primer
gcatctaaaaagcctcgccaaaa

SEQ ID NO: 2943 - DNA, 19 bp, Artificial Sequence
  Primer
cactcaacaaggcaaccaa

SEQ ID NO: 2944 - DNA, 20 bp, Artificial Sequence
  Primer
aagtcacataagcctcccat

SEQ ID NO: 2945 - DNA, 19 bp, Artificial Sequence
  Primer
gattgctgcctacactgct

SEQ ID NO: 2946 - DNA, 20 bp, Artificial Sequence
  Primer
aagtcacataagcctcccat

SEQ ID NO: 2947 - DNA, 24 bp, Artificial Sequence
  Primer
gcatctaaaaagcctcgccaaaaa

SEQ ID NO: 2948 - DNA, 19 bp, Artificial Sequence
  Primer
cccaccaacagagcctaaa

SEQ ID NO: 2949 - DNA, 20 bp, Artificial Sequence
  Primer
agacagagtcgtgttcgtcc

SEQ ID NO: 2950 - DNA, 19 bp, Artificial Sequence
  Primer
tggtgacggcaaaatgaaa

SEQ ID NO: 2951 - DNA, 18 bp, Artificial Sequence
  Primer
gcagcagaaacgctcaaa

SEQ ID NO: 2952 - DNA, 21 bp, Artificial Sequence
  Primer
ctaaaaagcctcgccaaaaac

SEQ ID NO: 2953 - DNA, 21 bp, Artificial Sequence
  Primer
ctaaaaagcctcgccaaaaac

SEQ ID NO: 2954 - DNA, 22 bp, Artificial Sequence
  Primer
tctaaaaagcctcgccaaaaac

SEQ ID NO: 2955 - DNA, 24 bp, Artificial Sequence
  Primer
catctaaaaagcctcgccaaaaac

SEQ ID NO: 2956 - DNA, 19 bp, Artificial Sequence
  Primer
cactcaacaaggcaaccaa

SEQ ID NO: 2957 - DNA, 19 bp, Artificial Sequence
  Primer
tcccaccaacagagcctaa

SEQ ID NO: 2958 - DNA, 19 bp, Artificial Sequence
  Primer
tggtccagaacaaacccaa

SEQ ID NO: 2959 - DNA, 20 bp, Artificial Sequence
  Primer
agacagagtcgtgttcgtcc

SEQ ID NO: 2960 - DNA, 22 bp, Artificial Sequence
  Primer
atgagtacggtacagaggatga

SEQ ID NO: 2961 - DNA, 20 bp, Artificial Sequence
  Primer
tcagagattgagccagaacc

SEQ ID NO: 2962 - DNA, 23 bp, Artificial Sequence
  Primer
cactgatgatatgattgctgcct

SEQ ID NO: 2963 - DNA, 22 bp, Artificial Sequence
  Primer
atgagtacggtacagaggatga

SEQ ID NO: 2964 - DNA, 22 bp, Artificial Sequence
  Primer
tcaagattggacctgaaagaac

SEQ ID NO: 2965 - DNA, 20 bp, Artificial Sequence
  Primer
tcagagattgagccagaacc

SEQ ID NO: 2966 - DNA, 18 bp, Artificial Sequence
  Primer
acaaacgtgcaacttgct

SEQ ID NO: 2967 - DNA, 18 bp, Artificial Sequence
  Primer
acaaacgtgcaacttgct

SEQ ID NO: 2968 - DNA, 18 bp, Artificial Sequence
  Primer
acaaacgtgcaacttgct

SEQ ID NO: 2969 - DNA, 19 bp, Artificial Sequence
  Primer
acgtgcaacttgcttttct

SEQ ID NO: 2970 - DNA, 19 bp, Artificial Sequence
  Primer
gcctctcttgttcttgctc

SEQ ID NO: 2971 - DNA, 20 bp, Artificial Sequence
  Primer
ccagaacaaacccaaggaaa

SEQ ID NO: 2972 - DNA, 19 bp, Artificial Sequence
  Primer
acgtgcaacttgcttttct

SEQ ID NO: 2973 - DNA, 20 bp, Artificial Sequence
  Primer
gcagagtgtgaggaagaaga

SEQ ID NO: 2974 - DNA, 19 bp, Artificial Sequence
  Primer
acgtgcaacttgcttttct

SEQ ID NO: 2975 - DNA, 21 bp, Artificial Sequence
  Primer
cgtgcaacttgcttttctact

SEQ ID NO: 2976 - DNA, 21 bp, Artificial Sequence
  Primer
cgtgcaacttgcttttctact

SEQ ID NO: 2977 - DNA, 21 bp, Artificial Sequence
  Primer
cgtgcaacttgcttttctact

SEQ ID NO: 2978 - DNA, 20 bp, Artificial Sequence
  Primer
ggcacccgcaatcctaataa

SEQ ID NO: 2979 - DNA, 20 bp, Artificial Sequence
  Primer
acattcccaccaacagagcc

SEQ ID NO: 2980 - DNA, 21 bp, Artificial Sequence
  Primer
aacctattctgttgcttgacc

SEQ ID NO: 2981 - DNA, 23 bp, Artificial Sequence
  Primer
ttgaggaagaagaagaggaagac

SEQ ID NO: 2982 - DNA, 20 bp, Artificial Sequence
  Primer
cggggaccaagacctaatca

SEQ ID NO: 2983 - DNA, 23 bp, Artificial Sequence
  Primer
gttgaggaagaagaagaggaaga

SEQ ID NO: 2984 - DNA, 21 bp, Artificial Sequence
  Primer
gctacacaccttccaaactca

SEQ ID NO: 2985 - DNA, 21 bp, Artificial Sequence
  Primer
tgaccctctaaagccaactaa

SEQ ID NO: 2986 - DNA, 19 bp, Artificial Sequence
  Primer
gcactcaacaaggcaacca

SEQ ID NO: 2987 - DNA, 19 bp, Artificial Sequence
  Primer
tcgcagcagaaacgctcaa

SEQ ID NO: 2988 - DNA, 22 bp, Artificial Sequence
  Primer
ctacacaccttccaaactcatt

SEQ ID NO: 2989 - DNA, 20 bp, Artificial Sequence
  Primer
acatttgctacacaccttcc

SEQ ID NO: 2990 - DNA, 22 bp, Artificial Sequence
  Primer
ctacacaccttccaaactcatt

SEQ ID NO: 2991 - DNA, 22 bp, Artificial Sequence
  Primer
ctacacaccttccaaactcatt

SEQ ID NO: 2992 - DNA, 19 bp, Artificial Sequence
  Primer
cctgaccctctaaagccaa

SEQ ID NO: 2993 - DNA, 21 bp, Artificial Sequence
  Primer
cacccgcaatcctaataacaa

SEQ ID NO: 2994 - DNA, 22 bp, Artificial Sequence
  Primer
gctacacaccttccaaactcat

SEQ ID NO: 2995 - DNA, 21 bp, Artificial Sequence
  Primer
ggaccaagacctaatcagaca

SEQ ID NO: 2996 - DNA, 20 bp, Artificial Sequence
  Primer
tggtagagtggaaggacagg

SEQ ID NO: 2997 - DNA, 20 bp, Artificial Sequence
  Primer
acatttgctacacaccttcc

SEQ ID NO: 2998 - DNA, 21 bp, Artificial Sequence
  Primer
gtagagtggaaggacaggtag

SEQ ID NO: 2999 - DNA, 22 bp, Artificial Sequence
  Primer
gctgctaacatacacctgaaac

SEQ ID NO: 3000 - DNA, 20 bp, Artificial Sequence
  Primer
ggctttacgggtaaccttca

SEQ ID NO: 3001 - DNA, 22 bp, Artificial Sequence
  Primer
ggaccaagacctaatcagacaa

SEQ ID NO: 3002 - DNA, 22 bp, Artificial Sequence
  Primer
ggctaagcgtaacattaaacca

SEQ ID NO: 3003 - DNA, 22 bp, Artificial Sequence
  Primer
gctgctaacatacacctgaaac

SEQ ID NO: 3004 - DNA, 24 bp, Artificial Sequence
  Primer
gctgctaacatacacctgaaacat

SEQ ID NO: 3005 - DNA, 22 bp, Artificial Sequence
  Primer
ggctaagcgtaacattaaacca

SEQ ID NO: 3006 - DNA, 20 bp, Artificial Sequence
  Primer
agcctcccattagttttcca

SEQ ID NO: 3007 - DNA, 22 bp, Artificial Sequence
  Primer
gctgctaacatacacctgaaac

SEQ ID NO: 3008 - DNA, 21 bp, Artificial Sequence
  Primer
gggtaaccttcagagtaacca

SEQ ID NO: 3009 - DNA, 22 bp, Artificial Sequence
  Primer
ctacacaccttccaaactcatt

SEQ ID NO: 3010 - DNA, 22 bp, Artificial Sequence
  Primer
gctgctaacatacacctgaaac

SEQ ID NO: 3011 - DNA, 22 bp, Artificial Sequence
  Primer
ggctaagcgtaacattaaacca

SEQ ID NO: 3012 - DNA, 19 bp, Artificial Sequence
  Primer
ttcgcagcagaaacgctca

SEQ ID NO: 3013 - DNA, 22 bp, Artificial Sequence
  Primer
ctacacaccttccaaactcatt

SEQ ID NO: 3014 - DNA, 21 bp, Artificial Sequence
  Primer
cacttgctgaactcaaatgct

SEQ ID NO: 3015 - DNA, 21 bp, Artificial Sequence
  Primer
gcatacaaaacattcccacca

SEQ ID NO: 3016 - DNA, 21 bp, Artificial Sequence
  Primer
gccattcttacagccttttca

SEQ ID NO: 3017 - DNA, 21 bp, Artificial Sequence
  Primer
cgcatacaaaacattcccacc

SEQ ID NO: 3018 - DNA, 21 bp, Artificial Sequence
  Primer
gggtaaccttcagagtaacca

SEQ ID NO: 3019 - DNA, 21 bp, Artificial Sequence
  Primer
gctgtaccctacaacatgaga

SEQ ID NO: 3020 - DNA, 20 bp, Artificial Sequence
  Primer
cgcatacaaaacattcccac

SEQ ID NO: 3021 - DNA, 21 bp, Artificial Sequence
  Primer
gctgtaccctacaacatgaga

SEQ ID NO: 3022 - DNA, 25 bp, Artificial Sequence
  Primer
cacattgacgcatacaaaacattcc

SEQ ID NO: 3023 - DNA, 22 bp, Artificial Sequence
  Primer
gctacacaccttccaaactcat

SEQ ID NO: 3024 - DNA, 22 bp, Artificial Sequence
  Primer
gctacacaccttccaaactcat

SEQ ID NO: 3025 - DNA, 21 bp, Artificial Sequence
  Primer
tgacgcatacaaaacattccc

SEQ ID NO: 3026 - DNA, 23 bp, Artificial Sequence
  Primer
cgagttgaggaagaagaagagga

SEQ ID NO: 3027 - DNA, 18 bp, Artificial Sequence
  Primer
aaaagagaagccccagca

SEQ ID NO: 3028 - DNA, 20 bp, Artificial Sequence
  Primer
gctacacaccttccaaactc

SEQ ID NO: 3029 - DNA, 18 bp, Artificial Sequence
  Primer
aaaagagaagccccagca

SEQ ID NO: 3030 - DNA, 22 bp, Artificial Sequence
  Primer
gcagacttcaaagccttcaaac

SEQ ID NO: 3031 - DNA, 20 bp, Artificial Sequence
  Primer
cggcatttcaacaccaaaac

SEQ ID NO: 3032 - DNA, 19 bp, Artificial Sequence
  Primer
gtgctttccttctgtgctt

SEQ ID NO: 3033 - DNA, 19 bp, Artificial Sequence
  Primer
gtgctttccttctgtgctt

SEQ ID NO: 3034 - DNA, 22 bp, Artificial Sequence
  Primer
ctctgtctacactgttgaatcc

SEQ ID NO: 3035 - DNA, 20 bp, Artificial Sequence
  Primer
catcctacacaggcacctac

SEQ ID NO: 3036 - DNA, 18 bp, Artificial Sequence
  Primer
aaacatgacgcccagaga

SEQ ID NO: 3037 - DNA, 20 bp, Artificial Sequence
  Primer
acgcatacaaaacattccca

SEQ ID NO: 3038 - DNA, 18 bp, Artificial Sequence
  Primer
aaaagagaagccccagca

SEQ ID NO: 3039 - DNA, 22 bp, Artificial Sequence
  Primer
ggcatttcaacaccaaaactca

SEQ ID NO: 3040 - DNA, 25 bp, Artificial Sequence
  Primer
gcgtaatgtcatccctactataact

SEQ ID NO: 3041 - DNA, 22 bp, Artificial Sequence
  Primer
ctctgtctacactgttgaatcc

SEQ ID NO: 3042 - DNA, 21 bp, Artificial Sequence
  Primer
gacataccaggcataccaaag

SEQ ID NO: 3043 - DNA, 19 bp, Artificial Sequence
  Primer
ccaggaaaagccaaccaac

SEQ ID NO: 3044 - DNA, 20 bp, Artificial Sequence
  Primer
gtacatgcgaaaggtcagaa

SEQ ID NO: 3045 - DNA, 22 bp, Artificial Sequence
  Primer
gcagacttcaaagccttcaaac

SEQ ID NO: 3046 - DNA, 20 bp, Artificial Sequence
  Primer
actgtgctgagagcaatcaa

SEQ ID NO: 3047 - DNA, 22 bp, Artificial Sequence
  Primer
gcagacttcaaagccttcaaac

SEQ ID NO: 3048 - DNA, 19 bp, Artificial Sequence
  Primer
gcaagggactttaccgtca

SEQ ID NO: 3049 - DNA, 22 bp, Artificial Sequence
  Primer
gcagacttcaaagccttcaaac

SEQ ID NO: 3050 - DNA, 22 bp, Artificial Sequence
  Primer
gcagacttcaaagccttcaaac

SEQ ID NO: 3051 - DNA, 22 bp, Artificial Sequence
  Primer
gcacctaatgctaaggaagaga

SEQ ID NO: 3052 - DNA, 21 bp, Artificial Sequence
  Primer
agacttcaaagccttcaaacc

SEQ ID NO: 3053 - DNA, 21 bp, Artificial Sequence
  Primer
gctacacaccttccaaactca

SEQ ID NO: 3054 - DNA, 25 bp, Artificial Sequence
  Primer
gcgtaatgtcatccctactataact

SEQ ID NO: 3055 - DNA, 19 bp, Artificial Sequence
  Primer
gcaagggactttaccgtca

SEQ ID NO: 3056 - DNA, 20 bp, Artificial Sequence
  Primer
ttgctacacaccttccaaac

SEQ ID NO: 3057 - DNA, 21 bp, Artificial Sequence
  Primer
agacttcaaagccttcaaacc

SEQ ID NO: 3058 - DNA, 21 bp, Artificial Sequence
  Primer
agacttcaaagccttcaaacc

SEQ ID NO: 3059 - DNA, 20 bp, Artificial Sequence
  Primer
ctattgttgctgctgctact

SEQ ID NO: 3060 - DNA, 19 bp, Artificial Sequence
  Primer
gcaagggactttaccgtca

SEQ ID NO: 3061 - DNA, 21 bp, Artificial Sequence
  Primer
agacttcaaagccttcaaacc

SEQ ID NO: 3062 - DNA, 18 bp, Artificial Sequence
  Primer
gctattgttgctgctgct

SEQ ID NO: 3063 - DNA, 20 bp, Artificial Sequence
  Primer
tggcagtagaagacacacaa

SEQ ID NO: 3064 - DNA, 23 bp, Artificial Sequence
  Primer
gcagacttcaaagccttcaaacc

SEQ ID NO: 3065 - DNA, 21 bp, Artificial Sequence
  Primer
gacataccaggcataccaaag

SEQ ID NO: 3066 - DNA, 21 bp, Artificial Sequence
  Primer
gacataccaggcataccaaag

SEQ ID NO: 3067 - DNA, 19 bp, Artificial Sequence
  Primer
tgcaactactcatgcctct

SEQ ID NO: 3068 - DNA, 19 bp, Artificial Sequence
  Primer
aaaagagaagccccagcac

SEQ ID NO: 3069 - DNA, 20 bp, Artificial Sequence
  Primer
cttctgctaatcttgctgct

SEQ ID NO: 3070 - DNA, 19 bp, Artificial Sequence
  Primer
cgagaaaacacacgtccaa

SEQ ID NO: 3071 - DNA, 19 bp, Artificial Sequence
  Primer
aaagagaagccccagcaca

SEQ ID NO: 3072 - DNA, 19 bp, Artificial Sequence
  Primer
aaagagaagccccagcaca

SEQ ID NO: 3073 - DNA, 25 bp, Artificial Sequence
  Primer
caccaaacacagaagattccaaaac

SEQ ID NO: 3074 - DNA, 18 bp, Artificial Sequence
  Primer
gctattgttgctgctgct

SEQ ID NO: 3075 - DNA, 21 bp, Artificial Sequence
  Primer
ttctgctaatcttgctgctac

SEQ ID NO: 3076 - DNA, 21 bp, Artificial Sequence
  Primer
ttctgctaatcttgctgctac

SEQ ID NO: 3077 - DNA, 22 bp, Artificial Sequence
  Primer
gctacacaccttccaaactcat

SEQ ID NO: 3078 - DNA, 22 bp, Artificial Sequence
  Primer
cttctgctaatcttgctgctac

SEQ ID NO: 3079 - DNA, 20 bp, Artificial Sequence
  Primer
ttgctacacaccttccaaac

SEQ ID NO: 3080 - DNA, 22 bp, Artificial Sequence
  Primer
gctacacaccttccaaactcat

SEQ ID NO: 3081 - DNA, 19 bp, Artificial Sequence
  Primer
gctgcaactactcatgcct

SEQ ID NO: 3082 - DNA, 22 bp, Artificial Sequence
  Primer
ctctgtctacactgttgaatcc

SEQ ID NO: 3083 - DNA, 21 bp, Artificial Sequence
  Primer
tctgctaatcttgctgctact

SEQ ID NO: 3084 - DNA, 19 bp, Artificial Sequence
  Primer
gcctctcttgttcttgctc

SEQ ID NO: 3085 - DNA, 21 bp, Artificial Sequence
  Primer
tctgctaatcttgctgctact

SEQ ID NO: 3086 - DNA, 20 bp, Artificial Sequence
  Primer
gctacacaccttccaaactc

SEQ ID NO: 3087 - DNA, 19 bp, Artificial Sequence
  Primer
gtgctttccttctgtgctt

SEQ ID NO: 3088 - DNA, 21 bp, Artificial Sequence
  Primer
tctgctaatcttgctgctact

SEQ ID NO: 3089 - DNA, 20 bp, Artificial Sequence
  Primer
gaacacctcaaaaatggcac

SEQ ID NO: 3090 - DNA, 21 bp, Artificial Sequence
  Primer
tctgctaatcttgctgctact

SEQ ID NO: 3091 - DNA, 19 bp, Artificial Sequence
  Primer
aagagaagccccagcacat

SEQ ID NO: 3092 - DNA, 20 bp, Artificial Sequence
  Primer
ccaccacagacatcaatcac

SEQ ID NO: 3093 - DNA, 20 bp, Artificial Sequence
  Primer
tgctacacaccttccaaact

SEQ ID NO: 3094 - DNA, 21 bp, Artificial Sequence
  Primer
tgactgacattgccaagaaac

SEQ ID NO: 3095 - DNA, 20 bp, Artificial Sequence
  Primer
actgacattgccaagaaacc

SEQ ID NO: 3096 - DNA, 21 bp, Artificial Sequence
  Primer
gtttcattcttggctcacctt

SEQ ID NO: 3097 - DNA, 19 bp, Artificial Sequence
  Primer
tgaaaacatgacgcccaga

SEQ ID NO: 3098 - DNA, 20 bp, Artificial Sequence
  Primer
gtacatgcgaaaggtcagaa

SEQ ID NO: 3099 - DNA, 19 bp, Artificial Sequence
  Primer
gtgctttccttctgtgctt

SEQ ID NO: 3100 - DNA, 21 bp, Artificial Sequence
  Primer
ttggactgagactgaccttac

SEQ ID NO: 3101 - DNA, 21 bp, Artificial Sequence
  Primer
tgacataccaggcataccaaa

SEQ ID NO: 3102 - DNA, 21 bp, Artificial Sequence
  Primer
gctaccaccttatgtccttcc

SEQ ID NO: 3103 - DNA, 21 bp, Artificial Sequence
  Primer
gctaccaccttatgtccttcc

SEQ ID NO: 3104 - DNA, 23 bp, Artificial Sequence
  Primer
gaggaagaagaagaggaagactg

SEQ ID NO: 3105 - DNA, 19 bp, Artificial Sequence
  Primer
ggaccccaatcaaaccaac

SEQ ID NO: 3106 - DNA, 21 bp, Artificial Sequence
  Primer
ttggaacattggacaacagag

SEQ ID NO: 3107 - DNA, 21 bp, Artificial Sequence
  Primer
gctaccaccttatgtccttcc

SEQ ID NO: 3108 - DNA, 21 bp, Artificial Sequence
  Primer
ttggaacattggacaacagag

SEQ ID NO: 3109 - DNA, 19 bp, Artificial Sequence
  Primer
tggaccccaatcaaaccaa

SEQ ID NO: 3110 - DNA, 21 bp, Artificial Sequence
  Primer
cttggaacattggacaacaga

SEQ ID NO: 3111 - DNA, 25 bp, Artificial Sequence
  Primer
gcttacccacttacaaaacatccta

SEQ ID NO: 3112 - DNA, 20 bp, Artificial Sequence
  Primer
ttgctacacaccttccaaac

SEQ ID NO: 3113 - DNA, 19 bp, Artificial Sequence
  Primer
ccaaccaacctcgatctct

SEQ ID NO: 3114 - DNA, 20 bp, Artificial Sequence
  Primer
acatttgctacacaccttcc

SEQ ID NO: 3115 - DNA, 21 bp, Artificial Sequence
  Primer
cttggaacattggacaacaga

SEQ ID NO: 3116 - DNA, 19 bp, Artificial Sequence
  Primer
accaccttatgtccttccc

SEQ ID NO: 3117 - DNA, 19 bp, Artificial Sequence
  Primer
tggaccccaatcaaaccaa

SEQ ID NO: 3118 - DNA, 21 bp, Artificial Sequence
  Primer
ctaccaccttatgtccttccc

SEQ ID NO: 3119 - DNA, 21 bp, Artificial Sequence
  Primer
ctaccaccttatgtccttccc

SEQ ID NO: 3120 - DNA, 19 bp, Artificial Sequence
  Primer
gcaagtcacataagcctcc

SEQ ID NO: 3121 - DNA, 19 bp, Artificial Sequence
  Primer
gcaagtcacataagcctcc

SEQ ID NO: 3122 - DNA, 22 bp, Artificial Sequence
  Primer
tatgtccttcccacaagcagcc

SEQ ID NO: 3123 - DNA, 22 bp, Artificial Sequence
  Primer
tatgtccttcccacaagcagcc

SEQ ID NO: 3124 - DNA, 24 bp, Artificial Sequence
  Primer
cttatgtccttcccacaagcagcc

SEQ ID NO: 3125 - DNA, 24 bp, Artificial Sequence
  Primer
ttatgtccttcccacaagcagccc

SEQ ID NO: 3126 - DNA, 24 bp, Artificial Sequence
  Primer
ttatgtccttcccacaagcagccc

SEQ ID NO: 3127 - DNA, 24 bp, Artificial Sequence
  Primer
ttatgtccttcccacaagcagccc

SEQ ID NO: 3128 - DNA, 19 bp, Artificial Sequence
  Primer
gcaagtcacataagcctcc

SEQ ID NO: 3129 - DNA, 20 bp, Artificial Sequence
  Primer
tgcttggaacattggacaac

SEQ ID NO: 3130 - DNA, 22 bp, Artificial Sequence
  Primer
gctgccaagaagaacaacatac

SEQ ID NO: 3131 - DNA, 22 bp, Artificial Sequence
  Primer
atgtgccatcccaggagaggaa

SEQ ID NO: 3132 - DNA, 21 bp, Artificial Sequence
  Primer
tgtagacatggtacatgcgaa

SEQ ID NO: 3133 - DNA, 22 bp, Artificial Sequence
  Primer
tcaggctggaaatgctacagaa

SEQ ID NO: 3134 - DNA, 19 bp, Artificial Sequence
  Primer
tgctgccaagaagaacaac

SEQ ID NO: 3135 - DNA, 20 bp, Artificial Sequence
  Primer
tgccatgtcctgcctgtcaa

SEQ ID NO: 3136 - DNA, 20 bp, Artificial Sequence
  Primer
gctacacaccttccaaactc

SEQ ID NO: 3137 - DNA, 20 bp, Artificial Sequence
  Primer
tgccatgtcctgcctgtcaa

SEQ ID NO: 3138 - DNA, 21 bp, Artificial Sequence
  Primer
tgtagacatggtacatgcgaa

SEQ ID NO: 3139 - DNA, 20 bp, Artificial Sequence
  Primer
cacctactctagtgccacaa

SEQ ID NO: 3140 - DNA, 21 bp, Artificial Sequence
  Primer
tgtagacatggtacatgcgaa

SEQ ID NO: 3141 - DNA, 21 bp, Artificial Sequence
  Primer
tgtagacatggtacatgcgaa

SEQ ID NO: 3142 - DNA, 19 bp, Artificial Sequence
  Primer
gtgctgccaagaagaacaa

SEQ ID NO: 3143 - DNA, 20 bp, Artificial Sequence
  Primer
tgacataccaggcataccaa

SEQ ID NO: 3144 - DNA, 22 bp, Artificial Sequence
  Primer
gctacaaacaatgtctttcgct

SEQ ID NO: 3145 - DNA, 20 bp, Artificial Sequence
  Primer
gctcaaagccactgaggaaa

SEQ ID NO: 3146 - DNA, 22 bp, Artificial Sequence
  Primer
gctacaaacaatgtctttcgct

SEQ ID NO: 3147 - DNA, 19 bp, Artificial Sequence
  Primer
gtgctgccaagaagaacaa

SEQ ID NO: 3148 - DNA, 21 bp, Artificial Sequence
  Primer
ggcattactatcagaccacca

SEQ ID NO: 3149 - DNA, 20 bp, Artificial Sequence
  Primer
gctacacaccttccaaactc

SEQ ID NO: 3150 - DNA, 19 bp, Artificial Sequence
  Primer
gctcaaagccactgaggaa

SEQ ID NO: 3151 - DNA, 21 bp, Artificial Sequence
  Primer
cgagggcaattcaccatttca

SEQ ID NO: 3152 - DNA, 18 bp, Artificial Sequence
  Primer
agaaacgctcaaagccac

SEQ ID NO: 3153 - DNA, 19 bp, Artificial Sequence
  Primer
caagtccaaatgcgacgag

SEQ ID NO: 3154 - DNA, 19 bp, Artificial Sequence
  Primer
gagccagaaccagaaccta

SEQ ID NO: 3155 - DNA, 19 bp, Artificial Sequence
  Primer
gtgctgccaagaagaacaa

SEQ ID NO: 3156 - DNA, 25 bp, Artificial Sequence
  Primer
aagaagaggacgatgcagagtgtga

SEQ ID NO: 3157 - DNA, 23 bp, Artificial Sequence
  Primer
ccatgttttctcctattgtgcct

SEQ ID NO: 3158 - DNA, 25 bp, Artificial Sequence
  Primer
aagaagaggacgatgcagagtgtga

SEQ ID NO: 3159 - DNA, 21 bp, Artificial Sequence
  Primer
ccacattgaccatccaaatcc

SEQ ID NO: 3160 - DNA, 20 bp, Artificial Sequence
  Primer
gcaagtcacataagcctccc

SEQ ID NO: 3161 - DNA, 20 bp, Artificial Sequence
  Primer
gcaagtcacataagcctccc

SEQ ID NO: 3162 - DNA, 20 bp, Artificial Sequence
  Primer
gcaagtcacataagcctccc

SEQ ID NO: 3163 - DNA, 21 bp, Artificial Sequence
  Primer
gcagattatcacaaccactca

SEQ ID NO: 3164 - DNA, 21 bp, Artificial Sequence
  Primer
gcagattatcacaaccactca

SEQ ID NO: 3165 - DNA, 22 bp, Artificial Sequence
  Primer
gcagagtgtgaggaagaagaaa

SEQ ID NO: 3166 - DNA, 20 bp, Artificial Sequence
  Primer
atccaaaatgtgacagagcc

SEQ ID NO: 3167 - DNA, 24 bp, Artificial Sequence
  Primer
gcaaacaatgctcttcactatgct

SEQ ID NO: 3168 - DNA, 20 bp, Artificial Sequence
  Primer
acatttgctacacaccttcc

SEQ ID NO: 3169 - DNA, 23 bp, Artificial Sequence
  Primer
gacgatgcagagtgtgaggaaga

SEQ ID NO: 3170 - DNA, 23 bp, Artificial Sequence
  Primer
gacgatgcagagtgtgaggaaga

SEQ ID NO: 3171 - DNA, 20 bp, Artificial Sequence
  Primer
acatttgctacacaccttcc

SEQ ID NO: 3172 - DNA, 24 bp, Artificial Sequence
  Primer
ccactcaacatcataccattgact

SEQ ID NO: 3173 - DNA, 21 bp, Artificial Sequence
  Primer
cgacaccttttcagcaacttt

SEQ ID NO: 3174 - DNA, 20 bp, Artificial Sequence
  Primer
acaggcacctacacacctca

SEQ ID NO: 3175 - DNA, 20 bp, Artificial Sequence
  Primer
gctacacaccttccaaactc

SEQ ID NO: 3176 - DNA, 19 bp, Artificial Sequence
  Primer
ttgagccagaaccagaacc

SEQ ID NO: 3177 - DNA, 21 bp, Artificial Sequence
  Primer
gcagattatcacaaccactca

SEQ ID NO: 3178 - DNA, 21 bp, Artificial Sequence
  Primer
gcagattatcacaaccactca

SEQ ID NO: 3179 - DNA, 22 bp, Artificial Sequence
  Primer
tcctacacaggcacctacacac

SEQ ID NO: 3180 - DNA, 21 bp, Artificial Sequence
  Primer
ggcattactatcagaccacca

SEQ ID NO: 3181 - DNA, 24 bp, Artificial Sequence
  Primer
gcagattatcacaaccactcaaac

SEQ ID NO: 3182 - DNA, 20 bp, Artificial Sequence
  Primer
ctacacaggcacctacacac

SEQ ID NO: 3183 - DNA, 21 bp, Artificial Sequence
  Primer
ggaagcacctaaacaagagga

SEQ ID NO: 3184 - DNA, 21 bp, Artificial Sequence
  Primer
ggaagcacctaaacaagagga

SEQ ID NO: 3185 - DNA, 20 bp, Artificial Sequence
  Primer
tgccaacctattctgttgct

SEQ ID NO: 3186 - DNA, 19 bp, Artificial Sequence
  Primer
tacacaggcacctacacac

SEQ ID NO: 3187 - DNA, 24 bp, Artificial Sequence
  Primer
gcagattatcacaaccactcaaac

SEQ ID NO: 3188 - DNA, 24 bp, Artificial Sequence
  Primer
gcagattatcacaaccactcaaac

SEQ ID NO: 3189 - DNA, 24 bp, Artificial Sequence
  Primer
gcagattatcacaaccactcaaac

SEQ ID NO: 3190 - DNA, 19 bp, Artificial Sequence
  Primer
accattgactacagcagcc

SEQ ID NO: 3191 - DNA, 20 bp, Artificial Sequence
  Primer
gcccatcaggaacatacgag

SEQ ID NO: 3192 - DNA, 23 bp, Artificial Sequence
  Primer
cttcatcctacacaggcacctac

SEQ ID NO: 3193 - DNA, 20 bp, Artificial Sequence
  Primer
gcaagggaggtaggactaga

SEQ ID NO: 3194 - DNA, 20 bp, Artificial Sequence
  Primer
gcccatcaggaacatacgag

SEQ ID NO: 3195 - DNA, 21 bp, Artificial Sequence
  Primer
gtagacatggtacatgcgaaa

SEQ ID NO: 3196 - DNA, 20 bp, Artificial Sequence
  Primer
gagattgagccagaaccaga

SEQ ID NO: 3197 - DNA, 19 bp, Artificial Sequence
  Primer
tcctacacaggcacctaca

SEQ ID NO: 3198 - DNA, 20 bp, Artificial Sequence
  Primer
gcagagtgtgaggaagaaga

SEQ ID NO: 3199 - DNA, 21 bp, Artificial Sequence
  Primer
tgctacacaccttccaaactc

SEQ ID NO: 3200 - DNA, 20 bp, Artificial Sequence
  Primer
aagtcacataagcctcccat

SEQ ID NO: 3201 - DNA, 21 bp, Artificial Sequence
  Primer
caacatttgctacacaccttc

SEQ ID NO: 3202 - DNA, 21 bp, Artificial Sequence
  Primer
gtagacatggtacatgcgaaa

SEQ ID NO: 3203 - DNA, 20 bp, Artificial Sequence
  Primer
gagattgagccagaaccaga

SEQ ID NO: 3204 - DNA, 21 bp, Artificial Sequence
  Primer
caacatttgctacacaccttc

SEQ ID NO: 3205 - DNA, 21 bp, Artificial Sequence
  Primer
gtagacatggtacatgcgaaa

SEQ ID NO: 3206 - DNA, 20 bp, Artificial Sequence
  Primer
gctacacaccttccaaactc

SEQ ID NO: 3207 - DNA, 19 bp, Artificial Sequence
  Primer
tcaggaacatacgagggca

SEQ ID NO: 3208 - DNA, 20 bp, Artificial Sequence
  Primer
gcaagggaggtaggactaga

SEQ ID NO: 3209 - DNA, 19 bp, Artificial Sequence
  Primer
accattgactacagcagcc

SEQ ID NO: 3210 - DNA, 19 bp, Artificial Sequence
  Primer
accattgactacagcagcc

SEQ ID NO: 3211 - DNA, 21 bp, Artificial Sequence
  Primer
gcacctacgcagtataaacaa

SEQ ID NO: 3212 - DNA, 19 bp, Artificial Sequence
  Primer
actacagcagccaaactca

SEQ ID NO: 3213 - DNA, 20 bp, Artificial Sequence
  Primer
tcctacacaggcacctacac

SEQ ID NO: 3214 - DNA, 25 bp, Artificial Sequence
  Primer
gcagattatcacaaccactcaaaca

SEQ ID NO: 3215 - DNA, 20 bp, Artificial Sequence
  Primer
tcctacacaggcacctacac

SEQ ID NO: 3216 - DNA, 25 bp, Artificial Sequence
  Primer
gcagattatcacaaccactcaaaca

SEQ ID NO: 3217 - DNA, 21 bp, Artificial Sequence
  Primer
tgacttcaatgcgatagcaac

SEQ ID NO: 3218 - DNA, 22 bp, Artificial Sequence
  Primer
catcctacacaggcacctacac

SEQ ID NO: 3219 - DNA, 25 bp, Artificial Sequence
  Primer
gcagattatcacaaccactcaaaca

SEQ ID NO: 3220 - DNA, 21 bp, Artificial Sequence
  Primer
gtagacatggtacatgcgaaa

SEQ ID NO: 3221 - DNA, 21 bp, Artificial Sequence
  Primer
gcagagtgtgaggaagaagaa

SEQ ID NO: 3222 - DNA, 19 bp, Artificial Sequence
  Primer
ctacacaggcacctacaca

SEQ ID NO: 3223 - DNA, 20 bp, Artificial Sequence
  Primer
actgtgctgagagcaatcaa

SEQ ID NO: 3224 - DNA, 20 bp, Artificial Sequence
  Primer
actgtgctgagagcaatcaa

SEQ ID NO: 3225 - DNA, 19 bp, Artificial Sequence
  Primer
tcgcagcagaaacgctcaa

SEQ ID NO: 3226 - DNA, 20 bp, Artificial Sequence
  Primer
actgtgctgagagcaatcaa

SEQ ID NO: 3227 - DNA, 25 bp, Artificial Sequence
  Primer
gcagattatcacaaccactcaaaca

SEQ ID NO: 3228 - DNA, 20 bp, Artificial Sequence
  Primer
ctaccaaccaccacagacat

SEQ ID NO: 3229 - DNA, 20 bp, Artificial Sequence
  Primer
gattgagccagaaccagaac

SEQ ID NO: 3230 - DNA, 19 bp, Artificial Sequence
  Primer
tcgcagcagaaacgctcaa

SEQ ID NO: 3231 - DNA, 19 bp, Artificial Sequence
  Primer
tacacaggcacctacacac

SEQ ID NO: 3232 - DNA, 20 bp, Artificial Sequence
  Primer
actgtgctgagagcaatcaa

SEQ ID NO: 3233 - DNA, 22 bp, Artificial Sequence
  Primer
gctacacaccttccaaactcat

SEQ ID NO: 3234 - DNA, 20 bp, Artificial Sequence
  Primer
catcctacacaggcacctac

SEQ ID NO: 3235 - DNA, 19 bp, Artificial Sequence
  Primer
gcactgccattggttcttt

SEQ ID NO: 3236 - DNA, 21 bp, Artificial Sequence
  Primer
tgctgatgttctctaccaacc

SEQ ID NO: 3237 - DNA, 19 bp, Artificial Sequence
  Primer
gagacaaaagaagcagccc

SEQ ID NO: 3238 - DNA, 22 bp, Artificial Sequence
  Primer
ctacacaccttccaaactcatt

SEQ ID NO: 3239 - DNA, 20 bp, Artificial Sequence
  Primer
cagagacaaaagaagcagcc

SEQ ID NO: 3240 - DNA, 21 bp, Artificial Sequence
  Primer
ccacattgaccatccaaatcc

SEQ ID NO: 3241 - DNA, 21 bp, Artificial Sequence
  Primer
tgatgttctctaccaaccacc

SEQ ID NO: 3242 - DNA, 21 bp, Artificial Sequence
  Primer
ccacattgaccatccaaatcc

SEQ ID NO: 3243 - DNA, 18 bp, Artificial Sequence
  Primer
gccgcagagacaaaagaa

SEQ ID NO: 3244 - DNA, 22 bp, Artificial Sequence
  Primer
gtggaggacaaccaatcaccaa

SEQ ID NO: 3245 - DNA, 20 bp, Artificial Sequence
  Primer
catcctacacaggcacctac

SEQ ID NO: 3246 - DNA, 20 bp, Artificial Sequence
  Primer
accaaaaacaaatcgccaac

SEQ ID NO: 3247 - DNA, 22 bp, Artificial Sequence
  Primer
gagaaccaaaaacaaatcgcca

SEQ ID NO: 3248 - DNA, 20 bp, Artificial Sequence
  Primer
cgcttcacctctactttgac

SEQ ID NO: 3249 - DNA, 20 bp, Artificial Sequence
  Primer
tcttcatcctacacaggcac

SEQ ID NO: 3250 - DNA, 22 bp, Artificial Sequence
  Primer
gagaaccaaaaacaaatcgcca

SEQ ID NO: 3251 - DNA, 21 bp, Artificial Sequence
  Primer
tgttccttttaccctccagat

SEQ ID NO: 3252 - DNA, 19 bp, Artificial Sequence
  Primer
gccaacaacaacaaggcca

SEQ ID NO: 3253 - DNA, 20 bp, Artificial Sequence
  Primer
tcttcatcctacacaggcac

SEQ ID NO: 3254 - DNA, 21 bp, Artificial Sequence
  Primer
tgttccttttaccctccagat

SEQ ID NO: 3255 - DNA, 19 bp, Artificial Sequence
  Primer
agacatccgctctcccatt

SEQ ID NO: 3256 - DNA, 25 bp, Artificial Sequence
  Primer
ccaacagagcctaaaaaggacaaaa

SEQ ID NO: 3257 - DNA, 21 bp, Artificial Sequence
  Primer
tgttccttttaccctccagat

SEQ ID NO: 3258 - DNA, 20 bp, Artificial Sequence
  Primer
gataagagctacgagcacca

SEQ ID NO: 3259 - DNA, 20 bp, Artificial Sequence
  Primer
tgctacacaccttccaaact

SEQ ID NO: 3260 - DNA, 21 bp, Artificial Sequence
  Primer
tgttccttttaccctccagat

SEQ ID NO: 3261 - DNA, 20 bp, Artificial Sequence
  Primer
ggaggacaaccaatcaccaa

SEQ ID NO: 3262 - DNA, 24 bp, Artificial Sequence
  Primer
gctgctcttcaaataccttttgct

SEQ ID NO: 3263 - DNA, 20 bp, Artificial Sequence
  Primer
ggctatcacaagggcaaaaa

SEQ ID NO: 3264 - DNA, 19 bp, Artificial Sequence
  Primer
gcctctcttgttcttgctc

SEQ ID NO: 3265 - DNA, 19 bp, Artificial Sequence
  Primer
aagagctacgagcaccaga

SEQ ID NO: 3266 - DNA, 19 bp, Artificial Sequence
  Primer
tgcctacactgctgctcta

SEQ ID NO: 3267 - DNA, 21 bp, Artificial Sequence
  Primer
cagatacttatgcctgctgga

SEQ ID NO: 3268 - DNA, 20 bp, Artificial Sequence
  Primer
gctgccaagaagaacaacat

SEQ ID NO: 3269 - DNA, 20 bp, Artificial Sequence
  Primer
ggctatcacaagggcaaaaa

SEQ ID NO: 3270 - DNA, 18 bp, Artificial Sequence
  Primer
attgctgcctacactgct

SEQ ID NO: 3271 - DNA, 18 bp, Artificial Sequence
  Primer
attgctgcctacactgct

SEQ ID NO: 3272 - DNA, 20 bp, Artificial Sequence
  Primer
ggctatcacaagggcaaaaa

SEQ ID NO: 3273 - DNA, 24 bp, Artificial Sequence
  Primer
gataagagctacgagcaccagaca

SEQ ID NO: 3274 - DNA, 19 bp, Artificial Sequence
  Primer
ggaggacaaccaatcacca

SEQ ID NO: 3275 - DNA, 24 bp, Artificial Sequence
  Primer
ccaacagagcctaaaaaggacaaa

SEQ ID NO: 3276 - DNA, 18 bp, Artificial Sequence
  Primer
tcaaaggggaatgcccaa

SEQ ID NO: 3277 - DNA, 21 bp, Artificial Sequence
  Primer
ctgatgatatgattgctgcct

SEQ ID NO: 3278 - DNA, 22 bp, Artificial Sequence
  Primer
gctcactgatgatatgattgct

SEQ ID NO: 3279 - DNA, 18 bp, Artificial Sequence
  Primer
tcaaaggggaatgcccaa

SEQ ID NO: 3280 - DNA, 22 bp, Artificial Sequence
  Primer
caacagagcctaaaaaggacaa

SEQ ID NO: 3281 - DNA, 21 bp, Artificial Sequence
  Primer
gtgacaaacgtgcaacttgct

SEQ ID NO: 3282 - DNA, 20 bp, Artificial Sequence
  Primer
tgctttccttctgtgctttt

SEQ ID NO: 3283 - DNA, 21 bp, Artificial Sequence
  Primer
tgaccctctaaagccaactaa

SEQ ID NO: 3284 - DNA, 22 bp, Artificial Sequence
  Primer
ccaacagagcctaaaaaggaca

SEQ ID NO: 3285 - DNA, 21 bp, Artificial Sequence
  Primer
tgaccctctaaagccaactaa

SEQ ID NO: 3286 - DNA, 22 bp, Artificial Sequence
  Primer
acaaactactgaaacagcacac

SEQ ID NO: 3287 - DNA, 21 bp, Artificial Sequence
  Primer
tgaccctctaaagccaactaa

SEQ ID NO: 3288 - DNA, 20 bp, Artificial Sequence
  Primer
gctgccaagaagaacaacat

SEQ ID NO: 3289 - DNA, 21 bp, Artificial Sequence
  Primer
caaactactgaaacagcacac

SEQ ID NO: 3290 - DNA, 18 bp, Artificial Sequence
  Primer
tcaaaggggaatgcccaa

SEQ ID NO: 3291 - DNA, 21 bp, Artificial Sequence
  Primer
ctgaccctctaaagccaacta

SEQ ID NO: 3292 - DNA, 21 bp, Artificial Sequence
  Primer
ctgaccctctaaagccaacta

SEQ ID NO: 3293 - DNA, 22 bp, Artificial Sequence
  Primer
ctctgtctacactgttgaatcc

SEQ ID NO: 3294 - DNA, 22 bp, Artificial Sequence
  Primer
tcaagattggacctgaaagaac

SEQ ID NO: 3295 - DNA, 20 bp, Artificial Sequence
  Primer
cctgaccctctaaagccaac

SEQ ID NO: 3296 - DNA, 20 bp, Artificial Sequence
  Primer
cctgaccctctaaagccaac

SEQ ID NO: 3297 - DNA, 21 bp, Artificial Sequence
  Primer
caaactactgaaacagcacac

SEQ ID NO: 3298 - DNA, 19 bp, Artificial Sequence
  Primer
ctacccaggaaaagccaac

SEQ ID NO: 3299 - DNA, 19 bp, Artificial Sequence
  Primer
cctgaccctctaaagccaa

SEQ ID NO: 3300 - DNA, 18 bp, Artificial Sequence
  Primer
acctctgcttgcgttctt

SEQ ID NO: 3301 - DNA, 18 bp, Artificial Sequence
  Primer
acctctgcttgcgttctt

SEQ ID NO: 3302 - DNA, 19 bp, Artificial Sequence
  Primer
cctgaccctctaaagccaa

SEQ ID NO: 3303 - DNA, 19 bp, Artificial Sequence
  Primer
cctgaccctctaaagccaa

SEQ ID NO: 3304 - DNA, 19 bp, Artificial Sequence
  Primer
gtagagggctgtcatgcaa

SEQ ID NO: 3305 - DNA, 19 bp, Artificial Sequence
  Primer
aggagccaccaaacacaga

SEQ ID NO: 3306 - DNA, 18 bp, Artificial Sequence
  Primer
acctctgcttgcgttctt

SEQ ID NO: 3307 - DNA, 22 bp, Artificial Sequence
  Primer
acacaaactactgaaacagcac

SEQ ID NO: 3308 - DNA, 24 bp, Artificial Sequence
  Primer
cataccaggcataccaaaggacat

SEQ ID NO: 3309 - DNA, 20 bp, Artificial Sequence
  Primer
ttacctgaccctctaaagcc

SEQ ID NO: 3310 - DNA, 20 bp, Artificial Sequence
  Primer
ttacctgaccctctaaagcc

SEQ ID NO: 3311 - DNA, 18 bp, Artificial Sequence
  Primer
tgctgaacaggatcgcaa

SEQ ID NO: 3312 - DNA, 21 bp, Artificial Sequence
  Primer
accaggcataccaaaggacat

SEQ ID NO: 3313 - DNA, 20 bp, Artificial Sequence
  Primer
ccaggcataccaaaggacat

SEQ ID NO: 3314 - DNA, 20 bp, Artificial Sequence
  Primer
ccaggcataccaaaggacat

SEQ ID NO: 3315 - DNA, 20 bp, Artificial Sequence
  Primer
ccaggcataccaaaggacat

SEQ ID NO: 3316 - DNA, 20 bp, Artificial Sequence
  Primer
ccaggcataccaaaggacat

SEQ ID NO: 3317 - DNA, 18 bp, Artificial Sequence
  Primer
tctgcttgcgttcttgct

SEQ ID NO: 3318 - DNA, 21 bp, Artificial Sequence
  Primer
cacaaactactgaaacagcac

SEQ ID NO: 3319 - DNA, 18 bp, Artificial Sequence
  Primer
tctgcttgcgttcttgct

SEQ ID NO: 3320 - DNA, 24 bp, Artificial Sequence
  Primer
ccactcaacatcataccattgact

SEQ ID NO: 3321 - DNA, 18 bp, Artificial Sequence
  Primer
tctgcttgcgttcttgct

SEQ ID NO: 3322 - DNA, 24 bp, Artificial Sequence
  Primer
ccactcaacatcataccattgact

SEQ ID NO: 3323 - DNA, 21 bp, Artificial Sequence
  Primer
cacaaactactgaaacagcac

SEQ ID NO: 3324 - DNA, 20 bp, Artificial Sequence
  Primer
tgctttccttctgtgctttt

SEQ ID NO: 3325 - DNA, 20 bp, Artificial Sequence
  Primer
tgctttccttctgtgctttt

SEQ ID NO: 3326 - DNA, 18 bp, Artificial Sequence
  Primer
tctgcttgcgttcttgct

SEQ ID NO: 3327 - DNA, 19 bp, Artificial Sequence
  Primer
tgcttgcgttcttgctgct

SEQ ID NO: 3328 - DNA, 24 bp, Artificial Sequence
  Primer
gcagattatcacaaccactcaaac

SEQ ID NO: 3329 - DNA, 20 bp, Artificial Sequence
  Primer
cgcttctgtcgtcaacattc

SEQ ID NO: 3330 - DNA, 21 bp, Artificial Sequence
  Primer
ctgcaatcaacagacctcaaa

SEQ ID NO: 3331 - DNA, 20 bp, Artificial Sequence
  Primer
cgcttctgtcgtcaacattc

SEQ ID NO: 3332 - DNA, 20 bp, Artificial Sequence
  Primer
cgcttctgtcgtcaacattc

SEQ ID NO: 3333 - DNA, 20 bp, Artificial Sequence
  Primer
cgcttctgtcgtcaacattc

SEQ ID NO: 3334 - DNA, 21 bp, Artificial Sequence
  Primer
ctgcaatcaacagacctcaaa

SEQ ID NO: 3335 - DNA, 19 bp, Artificial Sequence
  Primer
ccaggcataccaaaggaca

SEQ ID NO: 3336 - DNA, 18 bp, Artificial Sequence
  Primer
acatccgctctcccattt

SEQ ID NO: 3337 - DNA, 19 bp, Artificial Sequence
  Primer
tgcttgcgttcttgctgct

SEQ ID NO: 3338 - DNA, 21 bp, Artificial Sequence
  Primer
ctgcaatcaacagacctcaaa

SEQ ID NO: 3339 - DNA, 21 bp, Artificial Sequence
  Primer
gcgtaacattaaaccagtgcc

SEQ ID NO: 3340 - DNA, 19 bp, Artificial Sequence
  Primer
tgcttgcgttcttgctgct

SEQ ID NO: 3341 - DNA, 19 bp, Artificial Sequence
  Primer
ccaggcataccaaaggaca

SEQ ID NO: 3342 - DNA, 22 bp, Artificial Sequence
  Primer
ctctgtctacactgttgaatcc

SEQ ID NO: 3343 - DNA, 21 bp, Artificial Sequence
  Primer
gcgtaacattaaaccagtgcc

SEQ ID NO: 3344 - DNA, 22 bp, Artificial Sequence
  Primer
ctctgtctacactgttgaatcc

SEQ ID NO: 3345 - DNA, 21 bp, Artificial Sequence
  Primer
cgtggtccagaacaaacccaa

SEQ ID NO: 3346 - DNA, 21 bp, Artificial Sequence
  Primer
cgtggtccagaacaaacccaa

SEQ ID NO: 3347 - DNA, 22 bp, Artificial Sequence
  Primer
tgaatacacccaaagaccacat

SEQ ID NO: 3348 - DNA, 20 bp, Artificial Sequence
  Primer
caaaaacaaatcgccaacca

SEQ ID NO: 3349 - DNA, 21 bp, Artificial Sequence
  Primer
gcgtaacattaaaccagtgcc

SEQ ID NO: 3350 - DNA, 21 bp, Artificial Sequence
  Primer
ctcacttcgtcatcaaagaca

SEQ ID NO: 3351 - DNA, 19 bp, Artificial Sequence
  Primer
ccaggcataccaaaggaca

SEQ ID NO: 3352 - DNA, 21 bp, Artificial Sequence
  Primer
ttgaatacacccaaagaccac

SEQ ID NO: 3353 - DNA, 21 bp, Artificial Sequence
  Primer
ccaaaaacaaatcgccaacca

SEQ ID NO: 3354 - DNA, 21 bp, Artificial Sequence
  Primer
gcgtaacattaaaccagtgcc

SEQ ID NO: 3355 - DNA, 21 bp, Artificial Sequence
  Primer
tggaacattggacaacagaga

SEQ ID NO: 3356 - DNA, 22 bp, Artificial Sequence
  Primer
cgtaacattaaaccagtgccag

SEQ ID NO: 3357 - DNA, 21 bp, Artificial Sequence
  Primer
aacattaaaccagtgccagag

SEQ ID NO: 3358 - DNA, 20 bp, Artificial Sequence
  Primer
tgctttccttctgtgctttt

SEQ ID NO: 3359 - DNA, 25 bp, Artificial Sequence
  Primer
cattaaaccagtgccagagattaag

SEQ ID NO: 3360 - DNA, 20 bp, Artificial Sequence
  Primer
ctgcaatcaacagacctcaa

SEQ ID NO: 3361 - DNA, 20 bp, Artificial Sequence
  Primer
ctgcaatcaacagacctcaa

SEQ ID NO: 3362 - DNA, 20 bp, Artificial Sequence
  Primer
gactacaaaagagaagcccc

SEQ ID NO: 3363 - DNA, 20 bp, Artificial Sequence
  Primer
caaagacatctgaggagcac

SEQ ID NO: 3364 - DNA, 22 bp, Artificial Sequence
  Primer
ccaaaaacaaatcgccaaccaa

SEQ ID NO: 3365 - DNA, 20 bp, Artificial Sequence
  Primer
gactacaaaagagaagcccc

SEQ ID NO: 3366 - DNA, 19 bp, Artificial Sequence
  Primer
tcaaaggggaatgcccaaa

SEQ ID NO: 3367 - DNA, 19 bp, Artificial Sequence
  Primer
tcaaaggggaatgcccaaa

SEQ ID NO: 3368 - DNA, 20 bp, Artificial Sequence
  Primer
tgaatggattgaggcgaaac

SEQ ID NO: 3369 - DNA, 20 bp, Artificial Sequence
  Primer
cggggaccaagacctaatca

SEQ ID NO: 3370 - DNA, 20 bp, Artificial Sequence
  Primer
aaagtcgaggcggaggtaca

SEQ ID NO: 3371 - DNA, 19 bp, Artificial Sequence
  Primer
agcaacgataccgctacaa

SEQ ID NO: 3372 - DNA, 20 bp, Artificial Sequence
  Primer
gactacaaaagagaagcccc

SEQ ID NO: 3373 - DNA, 21 bp, Artificial Sequence
  Primer
gggaccaagacctaatcagac

SEQ ID NO: 3374 - DNA, 20 bp, Artificial Sequence
  Primer
ctgcaatcaacagacctcaa

SEQ ID NO: 3375 - DNA, 21 bp, Artificial Sequence
  Primer
acaaaacattcccaccaacag

SEQ ID NO: 3376 - DNA, 20 bp, Artificial Sequence
  Primer
aagtcgaggcggaggtacaa

SEQ ID NO: 3377 - DNA, 22 bp, Artificial Sequence
  Primer
aggaagaagaagaggaagactg

SEQ ID NO: 3378 - DNA, 22 bp, Artificial Sequence
  Primer
aggaagaagaagaggaagactg

SEQ ID NO: 3379 - DNA, 20 bp, Artificial Sequence
  Primer
gtacatgcgaaaggtcagaa

SEQ ID NO: 3380 - DNA, 20 bp, Artificial Sequence
  Primer
gtgctttccttctgtgcttt

SEQ ID NO: 3381 - DNA, 20 bp, Artificial Sequence
  Primer
gtgctttccttctgtgcttt

SEQ ID NO: 3382 - DNA, 22 bp, Artificial Sequence
  Primer
tgaggaagaagaagaggaagac

SEQ ID NO: 3383 - DNA, 20 bp, Artificial Sequence
  Primer
gactacaaaagagaagcccc

SEQ ID NO: 3384 - DNA, 20 bp, Artificial Sequence
  Primer
aagtcgaggcggaggtacaa

SEQ ID NO: 3385 - DNA, 20 bp, Artificial Sequence
  Primer
agtcgaggcggaggtacaaa

SEQ ID NO: 3386 - DNA, 22 bp, Artificial Sequence
  Primer
ctctgtctacactgttgaatcc

SEQ ID NO: 3387 - DNA, 22 bp, Artificial Sequence
  Primer
gccaccaaacacagaagattcc

SEQ ID NO: 3388 - DNA, 21 bp, Artificial Sequence
  Primer
ggtacatgcgaaaggtcagaa

SEQ ID NO: 3389 - DNA, 21 bp, Artificial Sequence
  Primer
ggtacatgcgaaaggtcagaa

SEQ ID NO: 3390 - DNA, 20 bp, Artificial Sequence
  Primer
actacaaaagagaagcccca

SEQ ID NO: 3391 - DNA, 20 bp, Artificial Sequence
  Primer
actacaaaagagaagcccca

SEQ ID NO: 3392 - DNA, 20 bp, Artificial Sequence
  Primer
gtgctttccttctgtgcttt

SEQ ID NO: 3393 - DNA, 20 bp, Artificial Sequence
  Primer
tgaatggattgaggcgaaac

SEQ ID NO: 3394 - DNA, 21 bp, Artificial Sequence
  Primer
tgccgtagtgtcagtatcatc

SEQ ID NO: 3395 - DNA, 21 bp, Artificial Sequence
  Primer
tggaacattggacaacagaga

SEQ ID NO: 3396 - DNA, 23 bp, Artificial Sequence
  Primer
tgctctctattacccatctgctc

SEQ ID NO: 3397 - DNA, 19 bp, Artificial Sequence
  Primer
tcaaaggggaatgcccaaa

SEQ ID NO: 3398 - DNA, 25 bp, Artificial Sequence
  Primer
ggttccatcatacagtttcctaaca

SEQ ID NO: 3399 - DNA, 20 bp, Artificial Sequence
  Primer
gtgctttccttctgtgcttt

SEQ ID NO: 3400 - DNA, 20 bp, Artificial Sequence
  Primer
ttgctacacaccttccaaac

SEQ ID NO: 3401 - DNA, 19 bp, Artificial Sequence
  Primer
acaagcctcactccctttc

SEQ ID NO: 3402 - DNA, 22 bp, Artificial Sequence
  Primer
tgaggaagaagaagaggaagac

SEQ ID NO: 3403 - DNA, 19 bp, Artificial Sequence
  Primer
acaagcctcactccctttc

SEQ ID NO: 3404 - DNA, 21 bp, Artificial Sequence
  Primer
gcatacaaaacattcccacca

SEQ ID NO: 3405 - DNA, 21 bp, Artificial Sequence
  Primer
ccagatgaggaagaagaggac

SEQ ID NO: 3406 - DNA, 21 bp, Artificial Sequence
  Primer
gcacattgacgcatacaaaac

SEQ ID NO: 3407 - DNA, 18 bp, Artificial Sequence
  Primer
tatgccgcttatgccact

SEQ ID NO: 3408 - DNA, 20 bp, Artificial Sequence
  Primer
attgttgctgctgctacttt

SEQ ID NO: 3409 - DNA, 20 bp, Artificial Sequence
  Primer
acccaacactcaacatctca

SEQ ID NO: 3410 - DNA, 20 bp, Artificial Sequence
  Primer
acccaacactcaacatctca

SEQ ID NO: 3411 - DNA, 21 bp, Artificial Sequence
  Primer
cataccaggcataccaaagga

SEQ ID NO: 3412 - DNA, 21 bp, Artificial Sequence
  Primer
cataccaggcataccaaagga

SEQ ID NO: 3413 - DNA, 25 bp, Artificial Sequence
  Primer
ggttccatcatacagtttcctaaca

SEQ ID NO: 3414 - DNA, 22 bp, Artificial Sequence
  Primer
gatgccaactactttgtttgct

SEQ ID NO: 3415 - DNA, 22 bp, Artificial Sequence
  Primer
catcgtcaagggtcaaatacag

SEQ ID NO: 3416 - DNA, 22 bp, Artificial Sequence
  Primer
cgtaagaacggtaataagggag

SEQ ID NO: 3417 - DNA, 21 bp, Artificial Sequence
  Primer
ctattgttgctgctgctactt

SEQ ID NO: 3418 - DNA, 20 bp, Artificial Sequence
  Primer
tgctgctaacatacacctga

SEQ ID NO: 3419 - DNA, 21 bp, Artificial Sequence
  Primer
aaaccagtgccagagattaag

SEQ ID NO: 3420 - DNA, 21 bp, Artificial Sequence
  Primer
acattaaaccagtgccagaga

SEQ ID NO: 3421 - DNA, 20 bp, Artificial Sequence
  Primer
tgctgctaacatacacctga

SEQ ID NO: 3422 - DNA, 22 bp, Artificial Sequence
  Primer
gtaacattaaaccagtgccaga

SEQ ID NO: 3423 - DNA, 19 bp, Artificial Sequence
  Primer
accaccttatgtccttccc

SEQ ID NO: 3424 - DNA, 21 bp, Artificial Sequence
  Primer
gctaccaccttatgtccttcc

SEQ ID NO: 3425 - DNA, 20 bp, Artificial Sequence
  Primer
tgctgctaacatacacctga

SEQ ID NO: 3426 - DNA, 22 bp, Artificial Sequence
  Primer
cgtaacattaaaccagtgccag

SEQ ID NO: 3427 - DNA, 20 bp, Artificial Sequence
  Primer
ccagaacctacacctgaaga

SEQ ID NO: 3428 - DNA, 20 bp, Artificial Sequence
  Primer
tatgatgagccgacgacgac

SEQ ID NO: 3429 - DNA, 20 bp, Artificial Sequence
  Primer
ccagaacctacacctgaaga

SEQ ID NO: 3430 - DNA, 21 bp, Artificial Sequence
  Primer
gcgtaacattaaaccagtgcc

SEQ ID NO: 3431 - DNA, 20 bp, Artificial Sequence
  Primer
tatgatgagccgacgacgac

SEQ ID NO: 3432 - DNA, 20 bp, Artificial Sequence
  Primer
gaaccagaacctacacctga

SEQ ID NO: 3433 - DNA, 20 bp, Artificial Sequence
  Primer
gaaccagaacctacacctga

SEQ ID NO: 3434 - DNA, 20 bp, Artificial Sequence
  Primer
gccagaaccagaacctacac

SEQ ID NO: 3435 - DNA, 20 bp, Artificial Sequence
  Primer
tgagccagaaccagaaccta

SEQ ID NO: 3436 - DNA, 21 bp, Artificial Sequence
  Primer
gctaccaccttatgtccttcc

SEQ ID NO: 3437 - DNA, 21 bp, Artificial Sequence
  Primer
acattaaccaggctacaacca

SEQ ID NO: 3438 - DNA, 22 bp, Artificial Sequence
  Primer
ggctaagcgtaacattaaacca

SEQ ID NO: 3439 - DNA, 19 bp, Artificial Sequence
  Primer
gagccagaaccagaaccta

SEQ ID NO: 3440 - DNA, 19 bp, Artificial Sequence
  Primer
gagccagaaccagaaccta

SEQ ID NO: 3441 - DNA, 19 bp, Artificial Sequence
  Primer
gagccagaaccagaaccta

SEQ ID NO: 3442 - DNA, 21 bp, Artificial Sequence
  Primer
gagattgagccagaaccagaa

SEQ ID NO: 3443 - DNA, 21 bp, Artificial Sequence
  Primer
acttgtgctgcctactacttt

SEQ ID NO: 3444 - DNA, 20 bp, Artificial Sequence
  Primer
gctgctgaacaggatcgcaa

SEQ ID NO: 3445 - DNA, 22 bp, Artificial Sequence
  Primer
atgatgagccgacgacgactac

SEQ ID NO: 3446 - DNA, 21 bp, Artificial Sequence
  Primer
tgatgttctctaccaaccacc

SEQ ID NO: 3447 - DNA, 19 bp, Artificial Sequence
  Primer
gacatccgctctcccattt

SEQ ID NO: 3448 - DNA, 22 bp, Artificial Sequence
  Primer
atgatgagccgacgacgactac

SEQ ID NO: 3449 - DNA, 19 bp, Artificial Sequence
  Primer
ggaccccaatcaaaccaac

SEQ ID NO: 3450 - DNA, 20 bp, Artificial Sequence
  Primer
gagattgagccagaaccaga

SEQ ID NO: 3451 - DNA, 20 bp, Artificial Sequence
  Primer
gagattgagccagaaccaga

SEQ ID NO: 3452 - DNA, 23 bp, Artificial Sequence
  Primer
agttgaggaagaagaagaggaag

SEQ ID NO: 3453 - DNA, 22 bp, Artificial Sequence
  Primer
ggctaagcgtaacattaaacca

SEQ ID NO: 3454 - DNA, 19 bp, Artificial Sequence
  Primer
ctaccaaccaccacagaca

SEQ ID NO: 3455 - DNA, 18 bp, Artificial Sequence
  Primer
accaaccaccacagacat

SEQ ID NO: 3456 - DNA, 22 bp, Artificial Sequence
  Primer
ggctaagcgtaacattaaacca

SEQ ID NO: 3457 - DNA, 20 bp, Artificial Sequence
  Primer
ccaccacagacatcaatcac

SEQ ID NO: 3458 - DNA, 22 bp, Artificial Sequence
  Primer
ggctaagcgtaacattaaacca

SEQ ID NO: 3459 - DNA, 23 bp, Artificial Sequence
  Primer
gagttgaggaagaagaagaggaa

SEQ ID NO: 3460 - DNA, 22 bp, Artificial Sequence
  Primer
gtgaacatgagtacggtacaga

SEQ ID NO: 3461 - DNA, 22 bp, Artificial Sequence
  Primer
ctcaggctgaagtagaatggaa

SEQ ID NO: 3462 - DNA, 21 bp, Artificial Sequence
  Primer
acaactcctggaacaatggaa

SEQ ID NO: 3463 - DNA, 21 bp, Artificial Sequence
  Primer
acaactcctggaacaatggaa

SEQ ID NO: 3464 - DNA, 18 bp, Artificial Sequence
  Primer
gctattgttgctgctgct

SEQ ID NO: 3465 - DNA, 21 bp, Artificial Sequence
  Primer
acaactcctggaacaatggaa

SEQ ID NO: 3466 - DNA, 18 bp, Artificial Sequence
  Primer
gctattgttgctgctgct

SEQ ID NO: 3467 - DNA, 18 bp, Artificial Sequence
  Primer
gctattgttgctgctgct

SEQ ID NO: 3468 - DNA, 19 bp, Artificial Sequence
  Primer
cctgaccctctaaagccaa

SEQ ID NO: 3469 - DNA, 23 bp, Artificial Sequence
  Primer
gcagagtgtgaggaagaagaaat

SEQ ID NO: 3470 - DNA, 19 bp, Artificial Sequence
  Primer
ggagccaccaaacacagaa

SEQ ID NO: 3471 - DNA, 21 bp, Artificial Sequence
  Primer
gctattgttgctgctgctact

SEQ ID NO: 3472 - DNA, 21 bp, Artificial Sequence
  Primer
ctattgttgctgctgctactt

SEQ ID NO: 3473 - DNA, 21 bp, Artificial Sequence
  Primer
ggagccaccaaacacagaaga

SEQ ID NO: 3474 - DNA, 19 bp, Artificial Sequence
  Primer
agacatccgctctcccatt

SEQ ID NO: 3475 - DNA, 21 bp, Artificial Sequence
  Primer
gcagagtgtgaggaagaagaa

SEQ ID NO: 3476 - DNA, 20 bp, Artificial Sequence
  Primer
gcagagtgtgaggaagaaga

SEQ ID NO: 3477 - DNA, 21 bp, Artificial Sequence
  Primer
acaactcctggaacaatggaa

SEQ ID NO: 3478 - DNA, 22 bp, Artificial Sequence
  Primer
ctgataatggaccccaatcaaa

SEQ ID NO: 3479 - DNA, 20 bp, Artificial Sequence
  Primer
gcagagtgtgaggaagaaga

SEQ ID NO: 3480 - DNA, 19 bp, Artificial Sequence
  Primer
tctgaggacaagagggcaa

SEQ ID NO: 3481 - DNA, 20 bp, Artificial Sequence
  Primer
gatgaggaagaagaggacga

SEQ ID NO: 3482 - DNA, 20 bp, Artificial Sequence
  Primer
gatgaggaagaagaggacga

SEQ ID NO: 3483 - DNA, 20 bp, Artificial Sequence
  Primer
gatgaggaagaagaggacga

SEQ ID NO: 3484 - DNA, 21 bp, Artificial Sequence
  Primer
aggacaagagggcaaaagtaa

SEQ ID NO: 3485 - DNA, 24 bp, Artificial Sequence
  Primer
ccactcaacatcataccattgact

SEQ ID NO: 3486 - DNA, 21 bp, Artificial Sequence
  Primer
acaactcctggaacaatggaa

SEQ ID NO: 3487 - DNA, 21 bp, Artificial Sequence
  Primer
ccagatgaggaagaagaggac

SEQ ID NO: 3488 - DNA, 21 bp, Artificial Sequence
  Primer
gggtaaccttcagagtaacca

SEQ ID NO: 3489 - DNA, 21 bp, Artificial Sequence
  Primer
tgttccttttaccctccagat

SEQ ID NO: 3490 - DNA, 22 bp, Artificial Sequence
  Primer
ctctgtctacactgttgaatcc

SEQ ID NO: 3491 - DNA, 19 bp, Artificial Sequence
  Primer
accattgactacagcagcc

SEQ ID NO: 3492 - DNA, 19 bp, Artificial Sequence
  Primer
accattgactacagcagcc

SEQ ID NO: 3493 - DNA, 22 bp, Artificial Sequence
  Primer
ctctgtctacactgttgaatcc

SEQ ID NO: 3494 - DNA, 20 bp, Artificial Sequence
  Primer
tcaagaacggtgaactcgaa

SEQ ID NO: 3495 - DNA, 20 bp, Artificial Sequence
  Primer
tcaagaacggtgaactcgaa

SEQ ID NO: 3496 - DNA, 19 bp, Artificial Sequence
  Primer
tgcaactactcatgcctct

SEQ ID NO: 3497 - DNA, 19 bp, Artificial Sequence
  Primer
tgcaactactcatgcctct

SEQ ID NO: 3498 - DNA, 20 bp, Artificial Sequence
  Primer
gcacacactttgcttttgct

SEQ ID NO: 3499 - DNA, 19 bp, Artificial Sequence
  Primer
tgcaactactcatgcctct

SEQ ID NO: 3500 - DNA, 19 bp, Artificial Sequence
  Primer
gctgcaactactcatgcct

SEQ ID NO: 3501 - DNA, 19 bp, Artificial Sequence
  Primer
accatttcaccctcttgct

SEQ ID NO: 3502 - DNA, 19 bp, Artificial Sequence
  Primer
gctgcaactactcatgcct

SEQ ID NO: 3503 - DNA, 21 bp, Artificial Sequence
  Primer
cagatacttatgcctgctgga

SEQ ID NO: 3504 - DNA, 19 bp, Artificial Sequence
  Primer
atcgctcaaagcaagggac

SEQ ID NO: 3505 - DNA, 21 bp, Artificial Sequence
  Primer
cgtgcaacttgcttttctact

SEQ ID NO: 3506 - DNA, 19 bp, Artificial Sequence
  Primer
accattgactacagcagcc

SEQ ID NO: 3507 - DNA, 19 bp, Artificial Sequence
  Primer
atcgctcaaagcaagggac

SEQ ID NO: 3508 - DNA, 20 bp, Artificial Sequence
  Primer
ctctacactccaaggaccac

SEQ ID NO: 3509 - DNA, 19 bp, Artificial Sequence
  Primer
atcgctcaaagcaagggac

SEQ ID NO: 3510 - DNA, 19 bp, Artificial Sequence
  Primer
acgtgcaacttgcttttct

SEQ ID NO: 3511 - DNA, 19 bp, Artificial Sequence
  Primer
atcgctcaaagcaagggac

SEQ ID NO: 3512 - DNA, 21 bp, Artificial Sequence
  Primer
tgaaaacatgacgcccagaga

SEQ ID NO: 3513 - DNA, 19 bp, Artificial Sequence
  Primer
ttgactacagcagccaaac

SEQ ID NO: 3514 - DNA, 22 bp, Artificial Sequence
  Primer
catcgtcaagggtcaaatacag

SEQ ID NO: 3515 - DNA, 20 bp, Artificial Sequence
  Primer
tgacatcgtcaagggtcaaa

SEQ ID NO: 3516 - DNA, 22 bp, Artificial Sequence
  Primer
gcagacttcaaagccttcaaac

SEQ ID NO: 3517 - DNA, 18 bp, Artificial Sequence
  Primer
acaaacgtgcaacttgct

SEQ ID NO: 3518 - DNA, 20 bp, Artificial Sequence
  Primer
tgacatcgtcaagggtcaaa

SEQ ID NO: 3519 - DNA, 21 bp, Artificial Sequence
  Primer
gcagattatcacaaccactca

SEQ ID NO: 3520 - DNA, 20 bp, Artificial Sequence
  Primer
atgtcctgcctgtcaagacc

SEQ ID NO: 3521 - DNA, 20 bp, Artificial Sequence
  Primer
aaaagcacagaaggaaagca

SEQ ID NO: 3522 - DNA, 19 bp, Artificial Sequence
  Primer
agcacagaaggaaagcaca

SEQ ID NO: 3523 - DNA, 19 bp, Artificial Sequence
  Primer
agcacagaaggaaagcaca

SEQ ID NO: 3524 - DNA, 20 bp, Artificial Sequence
  Primer
aaaagcacagaaggaaagca

SEQ ID NO: 3525 - DNA, 20 bp, Artificial Sequence
  Primer
aaaagcacagaaggaaagca

SEQ ID NO: 3526 - DNA, 19 bp, Artificial Sequence
  Primer
agcacagaaggaaagcaca

SEQ ID NO: 3527 - DNA, 22 bp, Artificial Sequence
  Primer
tcctcttcttcttcctcaactc

SEQ ID NO: 3528 - DNA, 19 bp, Artificial Sequence
  Primer
cgcaggaagaagagtcaca

SEQ ID NO: 3529 - DNA, 22 bp, Artificial Sequence
  Primer
tccttccactctaccatcaaac

SEQ ID NO: 3530 - DNA, 21 bp, Artificial Sequence
  Primer
ccttccactctaccatcaaac

SEQ ID NO: 3531 - DNA, 18 bp, Artificial Sequence
  Primer
aacagcagcatacagcca

SEQ ID NO: 3532 - DNA, 18 bp, Artificial Sequence
  Primer
aacagcagcatacagcca

SEQ ID NO: 3533 - DNA, 18 bp, Artificial Sequence
  Primer
aacagcagcatacagcca

SEQ ID NO: 3534 - DNA, 18 bp, Artificial Sequence
  Primer
aacagcagcatacagcca

SEQ ID NO: 3535 - DNA, 21 bp, Artificial Sequence
  Primer
aagaatcggacaccatagtca

SEQ ID NO: 3536 - DNA, 21 bp, Artificial Sequence
  Primer
agaatcggacaccatagtcaa

SEQ ID NO: 3537 - DNA, 21 bp, Artificial Sequence
  Primer
aagaatcggacaccatagtca

SEQ ID NO: 3538 - DNA, 21 bp, Artificial Sequence
  Primer
aagaatcggacaccatagtca

SEQ ID NO: 3539 - DNA, 22 bp, Artificial Sequence
  Primer
ccttccactctaccatcaaaca

SEQ ID NO: 3540 - DNA, 19 bp, Artificial Sequence
  Primer
agcaagaaccacaagagca

SEQ ID NO: 3541 - DNA, 25 bp, Artificial Sequence
  Primer
gcagaaagacacgcaatcataatca

SEQ ID NO: 3542 - DNA, 22 bp, Artificial Sequence
  Primer
ttcctcttcttcttcctcaact

SEQ ID NO: 3543 - DNA, 22 bp, Artificial Sequence
  Primer
gaagaatcggacaccatagtca

SEQ ID NO: 3544 - DNA, 19 bp, Artificial Sequence
  Primer
gcagaaagacacgcaatca

SEQ ID NO: 3545 - DNA, 22 bp, Artificial Sequence
  Primer
aagaatcggacaccatagtcaa

SEQ ID NO: 3546 - DNA, 21 bp, Artificial Sequence
  Primer
agcaagaataccacgaaagca

SEQ ID NO: 3547 - DNA, 19 bp, Artificial Sequence
  Primer
gcagaaagacacgcaatca

SEQ ID NO: 3548 - DNA, 22 bp, Artificial Sequence
  Primer
gcagaaagacacgcaatcataa

SEQ ID NO: 3549 - DNA, 21 bp, Artificial Sequence
  Primer
agaatcggacaccatagtcaa

SEQ ID NO: 3550 - DNA, 21 bp, Artificial Sequence
  Primer
agaatcggacaccatagtcaa

SEQ ID NO: 3551 - DNA, 22 bp, Artificial Sequence
  Primer
gcagaaagacacgcaatcataa

SEQ ID NO: 3552 - DNA, 19 bp, Artificial Sequence
  Primer
gcagaaagacacgcaatca

SEQ ID NO: 3553 - DNA, 22 bp, Artificial Sequence
  Primer
gcagaaagacacgcaatcataa

SEQ ID NO: 3554 - DNA, 25 bp, Artificial Sequence
  Primer
gcagaaagacacgcaatcataatca

SEQ ID NO: 3555 - DNA, 25 bp, Artificial Sequence
  Primer
gcagaaagacacgcaatcataatca

SEQ ID NO: 3556 - DNA, 21 bp, Artificial Sequence
  Primer
aagaatcggacaccatagtca

SEQ ID NO: 3557 - DNA, 21 bp, Artificial Sequence
  Primer
agaatcggacaccatagtcaa

SEQ ID NO: 3558 - DNA, 19 bp, Artificial Sequence
  Primer
gcagaaagacacgcaatca

SEQ ID NO: 3559 - DNA, 22 bp, Artificial Sequence
  Primer
gcagaaagacacgcaatcataa

SEQ ID NO: 3560 - DNA, 21 bp, Artificial Sequence
  Primer
aagaatcggacaccatagtca

SEQ ID NO: 3561 - DNA, 22 bp, Artificial Sequence
  Primer
ccttccactctaccatcaaaca

SEQ ID NO: 3562 - DNA, 21 bp, Artificial Sequence
  Primer
agaatcggacaccatagtcaa

SEQ ID NO: 3563 - DNA, 21 bp, Artificial Sequence
  Primer
gcaagaataccacgaaagcaa

SEQ ID NO: 3564 - DNA, 24 bp, Artificial Sequence
  Primer
gcaagaataccacgaaagcaagaa

SEQ ID NO: 3565 - DNA, 25 bp, Artificial Sequence
  Primer
gcaagaataccacgaaagcaagaaa

SEQ ID NO: 3566 - DNA, 22 bp, Artificial Sequence
  Primer
cttcctcttcttcttcctcaac

SEQ ID NO: 3567 - DNA, 22 bp, Artificial Sequence
  Primer
tcctcttcttcttcctcaactc

SEQ ID NO: 3568 - DNA, 22 bp, Artificial Sequence
  Primer
tcctcttcttcttcctcaactc

SEQ ID NO: 3569 - DNA, 20 bp, Artificial Sequence
  Primer
gtccttccactctaccatca

SEQ ID NO: 3570 - DNA, 22 bp, Artificial Sequence
  Primer
cttcctcttcttcttcctcaac

SEQ ID NO: 3571 - DNA, 20 bp, Artificial Sequence
  Primer
ttacatagcccatctgcctt

SEQ ID NO: 3572 - DNA, 21 bp, Artificial Sequence
  Primer
acaacagcatcaccatagtca

SEQ ID NO: 3573 - DNA, 19 bp, Artificial Sequence
  Primer
acttttgccctcttgtcct

SEQ ID NO: 3574 - DNA, 20 bp, Artificial Sequence
  Primer
attgccttcctcatccttct

SEQ ID NO: 3575 - DNA, 19 bp, Artificial Sequence
  Primer
acttttgccctcttgtcct

SEQ ID NO: 3576 - DNA, 20 bp, Artificial Sequence
  Primer
gccttcctcatccttctcct

SEQ ID NO: 3577 - DNA, 18 bp, Artificial Sequence
  Primer
aacagcagcatacagcca

SEQ ID NO: 3578 - DNA, 20 bp, Artificial Sequence
  Primer
aaaagcacagaaggaaagca

SEQ ID NO: 3579 - DNA, 21 bp, Artificial Sequence
  Primer
ccttccactctaccatcaaac

SEQ ID NO: 3580 - DNA, 19 bp, Artificial Sequence
  Primer
agcacagaaggaaagcaca

SEQ ID NO: 3581 - DNA, 20 bp, Artificial Sequence
  Primer
attgccttcctcatccttct

SEQ ID NO: 3582 - DNA, 20 bp, Artificial Sequence
  Primer
gccttcctcatccttctcct

SEQ ID NO: 3583 - DNA, 20 bp, Artificial Sequence
  Primer
attgccttcctcatccttct

SEQ ID NO: 3584 - DNA, 19 bp, Artificial Sequence
  Primer
acttttgccctcttgtcct

SEQ ID NO: 3585 - DNA, 19 bp, Artificial Sequence
  Primer
gtgatgaggagcgagaaga

SEQ ID NO: 3586 - DNA, 22 bp, Artificial Sequence
  Primer
catatagcagaaagacacgcaa

SEQ ID NO: 3587 - DNA, 19 bp, Artificial Sequence
  Primer
cagcaagaacgcaagcaga

SEQ ID NO: 3588 - DNA, 21 bp, Artificial Sequence
  Primer
catatagcagaaagacacgca

SEQ ID NO: 3589 - DNA, 21 bp, Artificial Sequence
  Primer
cataatcagggacaacaacca

SEQ ID NO: 3590 - DNA, 22 bp, Artificial Sequence
  Primer
catatagcagaaagacacgcaa

SEQ ID NO: 3591 - DNA, 21 bp, Artificial Sequence
  Primer
catatagcagaaagacacgca

SEQ ID NO: 3592 - DNA, 18 bp, Artificial Sequence
  Primer
acctttccacattccgca

SEQ ID NO: 3593 - DNA, 22 bp, Artificial Sequence
  Primer
catatagcagaaagacacgcaa

SEQ ID NO: 3594 - DNA, 21 bp, Artificial Sequence
  Primer
gtcaacaatttcagcaggaca

SEQ ID NO: 3595 - DNA, 20 bp, Artificial Sequence
  Primer
gccttcctcatccttctcct

SEQ ID NO: 3596 - DNA, 22 bp, Artificial Sequence
  Primer
cttcctcttcttcttcctcaac

SEQ ID NO: 3597 - DNA, 22 bp, Artificial Sequence
  Primer
ccttccactctaccatcaaaca

SEQ ID NO: 3598 - DNA, 20 bp, Artificial Sequence
  Primer
attgccttcctcatccttct

SEQ ID NO: 3599 - DNA, 21 bp, Artificial Sequence
  Primer
catatagcagaaagacacgca

SEQ ID NO: 3600 - DNA, 20 bp, Artificial Sequence
  Primer
gccttcctcatccttctcct

SEQ ID NO: 3601 - DNA, 19 bp, Artificial Sequence
  Primer
agcaagaaccacaagagca

SEQ ID NO: 3602 - DNA, 19 bp, Artificial Sequence
  Primer
agcaagaaccacaagagca

SEQ ID NO: 3603 - DNA, 19 bp, Artificial Sequence
  Primer
agcaagaaccacaagagca

SEQ ID NO: 3604 - DNA, 19 bp, Artificial Sequence
  Primer
gtgatgaggagcgagaaga

SEQ ID NO: 3605 - DNA, 19 bp, Artificial Sequence
  Primer
gtgatgaggagcgagaaga

SEQ ID NO: 3606 - DNA, 19 bp, Artificial Sequence
  Primer
gtgatgaggagcgagaaga

SEQ ID NO: 3607 - DNA, 20 bp, Artificial Sequence
  Primer
cagcagcaagcacaaaacaa

SEQ ID NO: 3608 - DNA, 19 bp, Artificial Sequence
  Primer
gacagcagcaagcacaaaa

SEQ ID NO: 3609 - DNA, 18 bp, Artificial Sequence
  Primer
gacagcagcaagcacaaa

SEQ ID NO: 3610 - DNA, 18 bp, Artificial Sequence
  Primer
agacagcagcaagcacaa

SEQ ID NO: 3611 - DNA, 22 bp, Artificial Sequence
  Primer
gacagcagcaagcacaaaacaa

SEQ ID NO: 3612 - DNA, 24 bp, Artificial Sequence
  Primer
gcaagaataccacgaaagcaagaa

SEQ ID NO: 3613 - DNA, 22 bp, Artificial Sequence
  Primer
caagaataccacgaaagcaaga

SEQ ID NO: 3614 - DNA, 21 bp, Artificial Sequence
  Primer
gcaagaataccacgaaagcaa

SEQ ID NO: 3615 - DNA, 19 bp, Artificial Sequence
  Primer
tcatcgcatcaacaccaca

SEQ ID NO: 3616 - DNA, 18 bp, Artificial Sequence
  Primer
aacagcagcatacagcca

SEQ ID NO: 3617 - DNA, 19 bp, Artificial Sequence
  Primer
acttttgccctcttgtcct

SEQ ID NO: 3618 - DNA, 19 bp, Artificial Sequence
  Primer
acttttgccctcttgtcct

SEQ ID NO: 3619 - DNA, 19 bp, Artificial Sequence
  Primer
cagcaagaacgcaagcaga

SEQ ID NO: 3620 - DNA, 22 bp, Artificial Sequence
  Primer
ggcatctacaatacagacaaca

SEQ ID NO: 3621 - DNA, 23 bp, Artificial Sequence
  Primer
ccactctaccatcaaacaagaca

SEQ ID NO: 3622 - DNA, 22 bp, Artificial Sequence
  Primer
ccttccactctaccatcaaaca

SEQ ID NO: 3623 - DNA, 24 bp, Artificial Sequence
  Primer
gcatcaccatagtcacctttttca

SEQ ID NO: 3624 - DNA, 22 bp, Artificial Sequence
  Primer
tctccatcttacctttcggtca

SEQ ID NO: 3625 - DNA, 19 bp, Artificial Sequence
  Primer
tgaaggacaggcaaactga

SEQ ID NO: 3626 - DNA, 22 bp, Artificial Sequence
  Primer
ggcatctacaatacagacaaca

SEQ ID NO: 3627 - DNA, 22 bp, Artificial Sequence
  Primer
cactctaccatcaaacaagaca

SEQ ID NO: 3628 - DNA, 18 bp, Artificial Sequence
  Primer
ttagcagcatcaccagca

SEQ ID NO: 3629 - DNA, 22 bp, Artificial Sequence
  Primer
agagcatagactaaatcagcca

SEQ ID NO: 3630 - DNA, 22 bp, Artificial Sequence
  Primer
agagcatagactaaatcagcca

SEQ ID NO: 3631 - DNA, 21 bp, Artificial Sequence
  Primer
ccatcttacctttcggtcaca

SEQ ID NO: 3632 - DNA, 21 bp, Artificial Sequence
  Primer
gtcagcacaagcaaaagcaaa

SEQ ID NO: 3633 - DNA, 20 bp, Artificial Sequence
  Primer
tccaagaacacactcagaca

SEQ ID NO: 3634 - DNA, 18 bp, Artificial Sequence
  Primer
tcagcacaagcaaaagca

SEQ ID NO: 3635 - DNA, 18 bp, Artificial Sequence
  Primer
tgcctgaaatgtcgccaa

SEQ ID NO: 3636 - DNA, 19 bp, Artificial Sequence
  Primer
cagcacaagcaaaagcaaa

SEQ ID NO: 3637 - DNA, 20 bp, Artificial Sequence
  Primer
cgtcagcacaagcaaaagca

SEQ ID NO: 3638 - DNA, 19 bp, Artificial Sequence
  Primer
gtcagcacaagcaaaagca

SEQ ID NO: 3639 - DNA, 20 bp, Artificial Sequence
  Primer
gtcagcacaagcaaaagcaa

SEQ ID NO: 3640 - DNA, 21 bp, Artificial Sequence
  Primer
gtcagcacaagcaaaagcaaa

SEQ ID NO: 3641 - DNA, 20 bp, Artificial Sequence
  Primer
acaatgagaaaaagtggcga

SEQ ID NO: 3642 - DNA, 21 bp, Artificial Sequence
  Primer
tgagaaaaagtggcgagtaga

SEQ ID NO: 3643 - DNA, 22 bp, Artificial Sequence
  Primer
ttcctcttcttcttcctcaact

SEQ ID NO: 3644 - DNA, 20 bp, Artificial Sequence
  Primer
gattcatcgcatcaacacca

SEQ ID NO: 3645 - DNA, 18 bp, Artificial Sequence
  Primer
aacagcagcatacagcca

SEQ ID NO: 3646 - DNA, 22 bp, Artificial Sequence
  Primer
ttcctcttcttcttcctcaact

SEQ ID NO: 3647 - DNA, 20 bp, Artificial Sequence
  Primer
gtcagcacaagcaaaagcaa

SEQ ID NO: 3648 - DNA, 19 bp, Artificial Sequence
  Primer
caagttaggcatcgcaaca

SEQ ID NO: 3649 - DNA, 18 bp, Artificial Sequence
  Primer
aacagcagcatacagcca

SEQ ID NO: 3650 - DNA, 20 bp, Artificial Sequence
  Primer
gccttcctcatccttctcct

SEQ ID NO: 3651 - DNA, 20 bp, Artificial Sequence
  Primer
gccttcctcatccttctcct

SEQ ID NO: 3652 - DNA, 20 bp, Artificial Sequence
  Primer
gccttcctcatccttctcct

SEQ ID NO: 3653 - DNA, 19 bp, Artificial Sequence
  Primer
cgcaggaagaagagtcaca

SEQ ID NO: 3654 - DNA, 19 bp, Artificial Sequence
  Primer
agcaagaaccacaagagca

SEQ ID NO: 3655 - DNA, 19 bp, Artificial Sequence
  Primer
agcaagaaccacaagagca

SEQ ID NO: 3656 - DNA, 22 bp, Artificial Sequence
  Primer
actactctaacagaaccctcca

SEQ ID NO: 3657 - DNA, 21 bp, Artificial Sequence
  Primer
gcccaaaagattagacaacca

SEQ ID NO: 3658 - DNA, 21 bp, Artificial Sequence
  Primer
gcaagaataccacgaaagcaa

SEQ ID NO: 3659 - DNA, 24 bp, Artificial Sequence
  Primer
gcaagaataccacgaaagcaagaa

SEQ ID NO: 3660 - DNA, 25 bp, Artificial Sequence
  Primer
gcaagaataccacgaaagcaagaaa

SEQ ID NO: 3661 - DNA, 20 bp, Artificial Sequence
  Primer
cgtcctcttcttcctcatct

SEQ ID NO: 3662 - DNA, 22 bp, Artificial Sequence
  Primer
ggcatctacaatacagacaaca

SEQ ID NO: 3663 - DNA, 22 bp, Artificial Sequence
  Primer
cttttcacatagggcatcaaca

SEQ ID NO: 3664 - DNA, 19 bp, Artificial Sequence
  Primer
agcacagaaggaaagcaca

SEQ ID NO: 3665 - DNA, 19 bp, Artificial Sequence
  Primer
cgcaagtgaccacgaatga

SEQ ID NO: 3666 - DNA, 18 bp, Artificial Sequence
  Primer
acgagcaaacagcctgaa

SEQ ID NO: 3667 - DNA, 19 bp, Artificial Sequence
  Primer
gagcaaacagcctgaagga

SEQ ID NO: 3668 - DNA, 19 bp, Artificial Sequence
  Primer
agcaaacagcctgaaggaa

SEQ ID NO: 3669 - DNA, 19 bp, Artificial Sequence
  Primer
aacagcctgaaggaagcaa

SEQ ID NO: 3670 - DNA, 19 bp, Artificial Sequence
  Primer
agcctgaaggaagcaacga

SEQ ID NO: 3671 - DNA, 19 bp, Artificial Sequence
  Primer
gcctgaaggaagcaacgaa

SEQ ID NO: 3672 - DNA, 19 bp, Artificial Sequence
  Primer
gcagaaagacacgcaatca

SEQ ID NO: 3673 - DNA, 22 bp, Artificial Sequence
  Primer
catatagcagaaagacacgcaa

SEQ ID NO: 3674 - DNA, 20 bp, Artificial Sequence
  Primer
aactgtcacctgtcacttct

SEQ ID NO: 3675 - DNA, 22 bp, Artificial Sequence
  Primer
acatacaaactaccaccatcac

SEQ ID NO: 3676 - DNA, 23 bp, Artificial Sequence
  Primer
ccttccactctaccatcaaacaa

SEQ ID NO: 3677 - DNA, 20 bp, Artificial Sequence
  Primer
gtccttccactctaccatca

SEQ ID NO: 3678 - DNA, 18 bp, Artificial Sequence
  Primer
ttagcagcatcaccagca

SEQ ID NO: 3679 - DNA, 21 bp, Artificial Sequence
  Primer
ccttccactctaccatcaaac

SEQ ID NO: 3680 - DNA, 20 bp, Artificial Sequence
  Primer
gccttcctcatccttctcct

SEQ ID NO: 3681 - DNA, 25 bp, Artificial Sequence
  Primer
gcagaaagacacgcaatcataatca

SEQ ID NO: 3682 - DNA, 22 bp, Artificial Sequence
  Primer
ccttccactctaccatcaaaca

SEQ ID NO: 3683 - DNA, 18 bp, Artificial Sequence
  Primer
taccgtcagcacaagcaa

SEQ ID NO: 3684 - DNA, 18 bp, Artificial Sequence
  Primer
accgtcagcacaagcaaa

SEQ ID NO: 3685 - DNA, 18 bp, Artificial Sequence
  Primer
ccgtcagcacaagcaaaa

SEQ ID NO: 3686 - DNA, 20 bp, Artificial Sequence
  Primer
gcaagaataccacgaaagca

SEQ ID NO: 3687 - DNA, 22 bp, Artificial Sequence
  Primer
gcagaaagacacgcaatcataa

SEQ ID NO: 3688 - DNA, 25 bp, Artificial Sequence
  Primer
gcagaaagacacgcaatcataatca

SEQ ID NO: 3689 - DNA, 21 bp, Artificial Sequence
  Primer
tccttccactctaccatcaaa

SEQ ID NO: 3690 - DNA, 20 bp, Artificial Sequence
  Primer
acacatctaaagcacccaca

SEQ ID NO: 3691 - DNA, 18 bp, Artificial Sequence
  Primer
taccgtcagcacaagcaa

SEQ ID NO: 3692 - DNA, 18 bp, Artificial Sequence
  Primer
accgtcagcacaagcaaa

SEQ ID NO: 3693 - DNA, 25 bp, Artificial Sequence
  Primer
catcaatttcttcttcctcacactc

SEQ ID NO: 3694 - DNA, 20 bp, Artificial Sequence
  Primer
gataacagcagcatacagcc

SEQ ID NO: 3695 - DNA, 22 bp, Artificial Sequence
  Primer
cttccactctaccatcaaacaa

SEQ ID NO: 3696 - DNA, 20 bp, Artificial Sequence
  Primer
attgccttcctcatccttct

SEQ ID NO: 3697 - DNA, 19 bp, Artificial Sequence
  Primer
gtgatgaggagcgagaaga

SEQ ID NO: 3698 - DNA, 18 bp, Artificial Sequence
  Primer
ccgtcagcacaagcaaaa

SEQ ID NO: 3699 - DNA, 20 bp, Artificial Sequence
  Primer
cgtcagcacaagcaaaagca

SEQ ID NO: 3700 - DNA, 21 bp, Artificial Sequence
  Primer
ccttccactctaccatcaaac

SEQ ID NO: 3701 - DNA, 21 bp, Artificial Sequence
  Primer
catatagcagaaagacacgca

SEQ ID NO: 3702 - DNA, 19 bp, Artificial Sequence
  Primer
cgcaggaagaagagtcaca

SEQ ID NO: 3703 - DNA, 19 bp, Artificial Sequence
  Primer
atgtcagccgcaggaagaa

SEQ ID NO: 3704 - DNA, 20 bp, Artificial Sequence
  Primer
agccgcaggaagaagagtca

SEQ ID NO: 3705 - DNA, 19 bp, Artificial Sequence
  Primer
cgcaggaagaagagtcaca

SEQ ID NO: 3706 - DNA, 19 bp, Artificial Sequence
  Primer
atgtcagccgcaggaagaa

SEQ ID NO: 3707 - DNA, 20 bp, Artificial Sequence
  Primer
agccgcaggaagaagagtca

SEQ ID NO: 3708 - DNA, 19 bp, Artificial Sequence
  Primer
cgcaggaagaagagtcaca

SEQ ID NO: 3709 - DNA, 19 bp, Artificial Sequence
  Primer
atgtcagccgcaggaagaa

SEQ ID NO: 3710 - DNA, 20 bp, Artificial Sequence
  Primer
agccgcaggaagaagagtca

SEQ ID NO: 3711 - DNA, 19 bp, Artificial Sequence
  Primer
atgtcagccgcaggaagaa

SEQ ID NO: 3712 - DNA, 20 bp, Artificial Sequence
  Primer
agccgcaggaagaagagtca

SEQ ID NO: 3713 - DNA, 20 bp, Artificial Sequence
  Primer
ccgcaggaagaagagtcaca

SEQ ID NO: 3714 - DNA, 20 bp, Artificial Sequence
  Primer
aaaagcacagaaggaaagca

SEQ ID NO: 3715 - DNA, 19 bp, Artificial Sequence
  Primer
cgcaggaagaagagtcaca

SEQ ID NO: 3716 - DNA, 19 bp, Artificial Sequence
  Primer
cgcaggaagaagagtcaca

SEQ ID NO: 3717 - DNA, 20 bp, Artificial Sequence
  Primer
gccttcctcatccttctcct

SEQ ID NO: 3718 - DNA, 19 bp, Artificial Sequence
  Primer
cgcaggaagaagagtcaca

SEQ ID NO: 3719 - DNA, 19 bp, Artificial Sequence
  Primer
atgtcagccgcaggaagaa

SEQ ID NO: 3720 - DNA, 19 bp, Artificial Sequence
  Primer
cgcaggaagaagagtcaca

SEQ ID NO: 3721 - DNA, 19 bp, Artificial Sequence
  Primer
cgcaggaagaagagtcaca

SEQ ID NO: 3722 - DNA, 19 bp, Artificial Sequence
  Primer
atgtcagccgcaggaagaa

SEQ ID NO: 3723 - DNA, 19 bp, Artificial Sequence
  Primer
atgtcagccgcaggaagaa

SEQ ID NO: 3724 - DNA, 19 bp, Artificial Sequence
  Primer
cgcaggaagaagagtcaca

SEQ ID NO: 3725 - DNA, 19 bp, Artificial Sequence
  Primer
cgcaggaagaagagtcaca

SEQ ID NO: 3726 - DNA, 19 bp, Artificial Sequence
  Primer
atgtcagccgcaggaagaa

SEQ ID NO: 3727 - DNA, 20 bp, Artificial Sequence
  Primer
agccgcaggaagaagagtca

SEQ ID NO: 3728 - DNA, 20 bp, Artificial Sequence
  Primer
atcagcagaagctccactca

SEQ ID NO: 3729 - DNA, 20 bp, Artificial Sequence
  Primer
atcagcagaagctccactca

SEQ ID NO: 3730 - DNA, 19 bp, Artificial Sequence
  Primer
gttaccgcaggactcaaca

SEQ ID NO: 3731 - DNA, 21 bp, Artificial Sequence
  Primer
actacagccataacctttcca

SEQ ID NO: 3732 - DNA, 19 bp, Artificial Sequence
  Primer
ccaagaacaaggctctcca

SEQ ID NO: 3733 - DNA, 21 bp, Artificial Sequence
  Primer
gtccttccactctaccatcaa

SEQ ID NO: 3734 - DNA, 25 bp, Artificial Sequence
  Primer
catcaatttcttcttcctcacactc

SEQ ID NO: 3735 - DNA, 20 bp, Artificial Sequence
  Primer
accaagaacaaggctctcca

SEQ ID NO: 3736 - DNA, 18 bp, Artificial Sequence
  Primer
tgccagcctgaacaagaa

SEQ ID NO: 3737 - DNA, 20 bp, Artificial Sequence
  Primer
gtccttccactctaccatca

SEQ ID NO: 3738 - DNA, 19 bp, Artificial Sequence
  Primer
taggcagcacaagtcacca

SEQ ID NO: 3739 - DNA, 20 bp, Artificial Sequence
  Primer
catcgtcctcttcttcctca

SEQ ID NO: 3740 - DNA, 21 bp, Artificial Sequence
  Primer
ccttccactctaccatcaaac

SEQ ID NO: 3741 - DNA, 19 bp, Artificial Sequence
  Primer
tgccagcctgaacaagaaa

SEQ ID NO: 3742 - DNA, 21 bp, Artificial Sequence
  Primer
tcccaaacagtatcttctcca

SEQ ID NO: 3743 - DNA, 19 bp, Artificial Sequence
  Primer
agcaagaaccacaagagca

SEQ ID NO: 3744 - DNA, 20 bp, Artificial Sequence
  Primer
acgcactacattccagggca

SEQ ID NO: 3745 - DNA, 20 bp, Artificial Sequence
  Primer
gcaagaataccacgaaagca

SEQ ID NO: 3746 - DNA, 20 bp, Artificial Sequence
  Primer
gcaagaataccacgaaagca

SEQ ID NO: 3747 - DNA, 18 bp, Artificial Sequence
  Primer
gcagcgacaagcaaaaga

SEQ ID NO: 3748 - DNA, 20 bp, Artificial Sequence
  Primer
acagccataacctttccaca

SEQ ID NO: 3749 - DNA, 18 bp, Artificial Sequence
  Primer
agcaagaacgcaagcaga

SEQ ID NO: 3750 - DNA, 22 bp, Artificial Sequence
  Primer
gtcttcctcttcttcttcctca

SEQ ID NO: 3751 - DNA, 18 bp, Artificial Sequence
  Primer
gcagcgacaagcaaaaga

SEQ ID NO: 3752 - DNA, 22 bp, Artificial Sequence
  Primer
gtccttccactctaccatcaaa

SEQ ID NO: 3753 - DNA, 20 bp, Artificial Sequence
  Primer
gctcttgttgaacctcctct

SEQ ID NO: 3754 - DNA, 20 bp, Artificial Sequence
  Primer
agacacatctaaagcaccca

SEQ ID NO: 3755 - DNA, 19 bp, Artificial Sequence
  Primer
gcatcgtcctcttcttcct

SEQ ID NO: 3756 - DNA, 20 bp, Artificial Sequence
  Primer
attgccttcctcatccttct

SEQ ID NO: 3757 - DNA, 20 bp, Artificial Sequence
  Primer
acacatctaaagcacccaca

SEQ ID NO: 3758 - DNA, 19 bp, Artificial Sequence
  Primer
cgcaggaagaagagtcaca

SEQ ID NO: 3759 - DNA, 19 bp, Artificial Sequence
  Primer
tcatcgcatcaacaccaca

SEQ ID NO: 3760 - DNA, 20 bp, Artificial Sequence
  Primer
agcagcagtgtaggcagcaa

SEQ ID NO: 3761 - DNA, 20 bp, Artificial Sequence
  Primer
gccctctacatcaaagccaa

SEQ ID NO: 3762 - DNA, 21 bp, Artificial Sequence
  Primer
gcagaaaggctaaaaagcaca

SEQ ID NO: 3763 - DNA, 20 bp, Artificial Sequence
  Primer
agccgcaggaagaagagtca

SEQ ID NO: 3764 - DNA, 22 bp, Artificial Sequence
  Primer
gcagaaaggctaaaaagcacaa

SEQ ID NO: 3765 - DNA, 20 bp, Artificial Sequence
  Primer
agccgcaggaagaagagtca

SEQ ID NO: 3766 - DNA, 20 bp, Artificial Sequence
  Primer
gccctctacatcaaagccaa

SEQ ID NO: 3767 - DNA, 19 bp, Artificial Sequence
  Primer
cgcaggaagaagagtcaca

SEQ ID NO: 3768 - DNA, 19 bp, Artificial Sequence
  Primer
gccctctacatcaaagcca

SEQ ID NO: 3769 - DNA, 20 bp, Artificial Sequence
  Primer
gccctctacatcaaagccaa

SEQ ID NO: 3770 - DNA, 22 bp, Artificial Sequence
  Primer
cctctacatcaaagccaatcca

SEQ ID NO: 3771 - DNA, 25 bp, Artificial Sequence
  Primer
gccaataacgacatcacaatttcct

SEQ ID NO: 3772 - DNA, 25 bp, Artificial Sequence
  Primer
gccaataacgacatcacaatttcct

SEQ ID NO: 3773 - DNA, 20 bp, Artificial Sequence
  Primer
agcagaaaggctaaaaagca

SEQ ID NO: 3774 - DNA, 21 bp, Artificial Sequence
  Primer
gcagaaaggctaaaaagcaca

SEQ ID NO: 3775 - DNA, 22 bp, Artificial Sequence
  Primer
gcagaaaggctaaaaagcacaa

SEQ ID NO: 3776 - DNA, 18 bp, Artificial Sequence
  Primer
tcaaagccaatccacgca

SEQ ID NO: 3777 - DNA, 19 bp, Artificial Sequence
  Primer
aagccaatccacgcacgaa

SEQ ID NO: 3778 - DNA, 22 bp, Artificial Sequence
  Primer
gccacaaggttaaagtcattca

SEQ ID NO: 3779 - DNA, 19 bp, Artificial Sequence
  Primer
ccattgcgtcctccattct

SEQ ID NO: 3780 - DNA, 19 bp, Artificial Sequence
  Primer
ccattgcgtcctccattct

SEQ ID NO: 3781 - DNA, 20 bp, Artificial Sequence
  Primer
tgttgaacctcctcttgtct

SEQ ID NO: 3782 - DNA, 19 bp, Artificial Sequence
  Primer
cgcaggaagaagagtcaca

SEQ ID NO: 3783 - DNA, 19 bp, Artificial Sequence
  Primer
cgcaggaagaagagtcaca

SEQ ID NO: 3784 - DNA, 18 bp, Artificial Sequence
  Primer
catcgcatcaacaccaca

SEQ ID NO: 3785 - DNA, 22 bp, Artificial Sequence
  Primer
cttccactctaccatcaaacaa

SEQ ID NO: 3786 - DNA, 21 bp, Artificial Sequence
  Primer
cagacacatctaaagcaccca

SEQ ID NO: 3787 - DNA, 18 bp, Artificial Sequence
  Primer
aacagcagcatacagcca

SEQ ID NO: 3788 - DNA, 19 bp, Artificial Sequence
  Primer
ctttccacattccgcagac

SEQ ID NO: 3789 - DNA, 21 bp, Artificial Sequence
  Primer
agattcatcgcatcaacacca

SEQ ID NO: 3790 - DNA, 20 bp, Artificial Sequence
  Primer
aactgtcacctgtcacttct

SEQ ID NO: 3791 - DNA, 21 bp, Artificial Sequence
  Primer
tccaagaacacactcagacat

SEQ ID NO: 3792 - DNA, 20 bp, Artificial Sequence
  Primer
gataacagcagcatacagcc

SEQ ID NO: 3793 - DNA, 25 bp, Artificial Sequence
  Primer
gccaataacgacatcacaatttcct

SEQ ID NO: 3794 - DNA, 20 bp, Artificial Sequence
  Primer
gcaaaagcacagaaggaaag

SEQ ID NO: 3795 - DNA, 21 bp, Artificial Sequence
  Primer
caactgtcacctgtcacttct

SEQ ID NO: 3796 - DNA, 20 bp, Artificial Sequence
  Primer
gtttcgcctcaatccattca

SEQ ID NO: 3797 - DNA, 19 bp, Artificial Sequence
  Primer
agcacagaaggaaagcaca

SEQ ID NO: 3798 - DNA, 20 bp, Artificial Sequence
  Primer
gcaccaaatatgcctgctga

SEQ ID NO: 3799 - DNA, 20 bp, Artificial Sequence
  Primer
aaaagcacagaaggaaagca

SEQ ID NO: 3800 - DNA, 18 bp, Artificial Sequence
  Primer
aatgcctgaaatgtcgcc

SEQ ID NO: 3801 - DNA, 19 bp, Artificial Sequence
  Primer
cttttgccctcttgtcctc

SEQ ID NO: 3802 - DNA, 22 bp, Artificial Sequence
  Primer
cgccaataacaagccatccgaa

SEQ ID NO: 3803 - DNA, 23 bp, Artificial Sequence
  Primer
cgccaataacaagccatccgaaa

SEQ ID NO: 3804 - DNA, 19 bp, Artificial Sequence
  Primer
caacgccaataacaagcca

SEQ ID NO: 3805 - DNA, 18 bp, Artificial Sequence
  Primer
aacagcagcatacagcca

SEQ ID NO: 3806 - DNA, 19 bp, Artificial Sequence
  Primer
caacgccaataacaagcca

SEQ ID NO: 3807 - DNA, 19 bp, Artificial Sequence
  Primer
cttttgccctcttgtcctc

SEQ ID NO: 3808 - DNA, 19 bp, Artificial Sequence
  Primer
caacgccaataacaagcca

SEQ ID NO: 3809 - DNA, 20 bp, Artificial Sequence
  Primer
gataacagcagcatacagcc

SEQ ID NO: 3810 - DNA, 18 bp, Artificial Sequence
  Primer
gcagcgacaagcaaaaga

SEQ ID NO: 3811 - DNA, 20 bp, Artificial Sequence
  Primer
aactgtcacctgtcacttct

SEQ ID NO: 3812 - DNA, 20 bp, Artificial Sequence
  Primer
agccgcaggaagaagagtca

SEQ ID NO: 3813 - DNA, 19 bp, Artificial Sequence
  Primer
atgtcagccgcaggaagaa

SEQ ID NO: 3814 - DNA, 19 bp, Artificial Sequence
  Primer
cgcaggaagaagagtcaca

SEQ ID NO: 3815 - DNA, 20 bp, Artificial Sequence
  Primer
agccgcaggaagaagagtca

SEQ ID NO: 3816 - DNA, 19 bp, Artificial Sequence
  Primer
cgcaggaagaagagtcaca

SEQ ID NO: 3817 - DNA, 19 bp, Artificial Sequence
  Primer
cgcaggaagaagagtcaca

SEQ ID NO: 3818 - DNA, 19 bp, Artificial Sequence
  Primer
atgtcagccgcaggaagaa

SEQ ID NO: 3819 - DNA, 19 bp, Artificial Sequence
  Primer
gtgatgaggagcgagaaga

SEQ ID NO: 3820 - DNA, 20 bp, Artificial Sequence
  Primer
tgatgaggagcgagaagagg

SEQ ID NO: 3821 - DNA, 19 bp, Artificial Sequence
  Primer
tgatgaggagcgagaagag

SEQ ID NO: 3822 - DNA, 19 bp, Artificial Sequence
  Primer
tgccttcctcatccttctc

SEQ ID NO: 3823 - DNA, 21 bp, Artificial Sequence
  Primer
acacggtaaccagtaaagaca

SEQ ID NO: 3824 - DNA, 19 bp, Artificial Sequence
  Primer
gtgatgaggagcgagaaga

SEQ ID NO: 3825 - DNA, 21 bp, Artificial Sequence
  Primer
acaacagcatcaccatagtca

SEQ ID NO: 3826 - DNA, 20 bp, Artificial Sequence
  Primer
tgatgaggagcgagaagagg

SEQ ID NO: 3827 - DNA, 19 bp, Artificial Sequence
  Primer
tgatgaggagcgagaagag

SEQ ID NO: 3828 - DNA, 18 bp, Artificial Sequence
  Primer
accctttgctaactcgct

SEQ ID NO: 3829 - DNA, 20 bp, Artificial Sequence
  Primer
tgatgaggagcgagaagagg

SEQ ID NO: 3830 - DNA, 19 bp, Artificial Sequence
  Primer
tgatgaggagcgagaagag

SEQ ID NO: 3831 - DNA, 21 bp, Artificial Sequence
  Primer
gttacttttgccctcttgtcc

SEQ ID NO: 3832 - DNA, 20 bp, Artificial Sequence
  Primer
tgatgaggagcgagaagagg

SEQ ID NO: 3833 - DNA, 19 bp, Artificial Sequence
  Primer
tgatgaggagcgagaagag

SEQ ID NO: 3834 - DNA, 20 bp, Artificial Sequence
  Primer
gtaagagccagccaaagaaa

SEQ ID NO: 3835 - DNA, 20 bp, Artificial Sequence
  Primer
tgccttcctcatccttctcc

SEQ ID NO: 3836 - DNA, 20 bp, Artificial Sequence
  Primer
gataacagcagcatacagcc

SEQ ID NO: 3837 - DNA, 19 bp, Artificial Sequence
  Primer
tcattttgccgtcaccacc

SEQ ID NO: 3838 - DNA, 20 bp, Artificial Sequence
  Primer
tctttcattttgccgtcacc

SEQ ID NO: 3839 - DNA, 21 bp, Artificial Sequence
  Primer
gttacttttgccctcttgtcc

SEQ ID NO: 3840 - DNA, 20 bp, Artificial Sequence
  Primer
tctttcattttgccgtcacc

SEQ ID NO: 3841 - DNA, 19 bp, Artificial Sequence
  Primer
cttttgccctcttgtcctc

SEQ ID NO: 3842 - DNA, 19 bp, Artificial Sequence
  Primer
acttttgccctcttgtcct

SEQ ID NO: 3843 - DNA, 21 bp, Artificial Sequence
  Primer
ttgttgaacctcctcttgtct

SEQ ID NO: 3844 - DNA, 20 bp, Artificial Sequence
  Primer
gctcttgttgaacctcctct

SEQ ID NO: 3845 - DNA, 20 bp, Artificial Sequence
  Primer
tgttgaacctcctcttgtct

SEQ ID NO: 3846 - DNA, 20 bp, Artificial Sequence
  Primer
gctcttgttgaacctcctct

SEQ ID NO: 3847 - DNA, 23 bp, Artificial Sequence
  Primer
taccgtcagcacaagcaaaagca

SEQ ID NO: 3848 - DNA, 21 bp, Artificial Sequence
  Primer
ccgtcagcacaagcaaaagca

SEQ ID NO: 3849 - DNA, 21 bp, Artificial Sequence
  Primer
gttacttttgccctcttgtcc

SEQ ID NO: 3850 - DNA, 20 bp, Artificial Sequence
  Primer
aactgtcacctgtcacttct

SEQ ID NO: 3851 - DNA, 20 bp, Artificial Sequence
  Primer
gccagtaaaccaggagacaa

SEQ ID NO: 3852 - DNA, 20 bp, Artificial Sequence
  Primer
gataacagcagcatacagcc

SEQ ID NO: 3853 - DNA, 21 bp, Artificial Sequence
  Primer
catatagcagaaagacacgca

SEQ ID NO: 3854 - DNA, 19 bp, Artificial Sequence
  Primer
gccagtaaaccaggagaca

SEQ ID NO: 3855 - DNA, 21 bp, Artificial Sequence
  Primer
aagaatcggacaccatagtca

SEQ ID NO: 3856 - DNA, 22 bp, Artificial Sequence
  Primer
catatagcagaaagacacgcaa

SEQ ID NO: 3857 - DNA, 19 bp, Artificial Sequence
  Primer
ccccactgctgaacatcaa

SEQ ID NO: 3858 - DNA, 19 bp, Artificial Sequence
  Primer
tgccttcctcatccttctc

SEQ ID NO: 3859 - DNA, 19 bp, Artificial Sequence
  Primer
gctatccgcatcaacaact

SEQ ID NO: 3860 - DNA, 21 bp, Artificial Sequence
  Primer
gttacttttgccctcttgtcc

SEQ ID NO: 3861 - DNA, 21 bp, Artificial Sequence
  Primer
gttacttttgccctcttgtcc

SEQ ID NO: 3862 - DNA, 20 bp, Artificial Sequence
  Primer
tgccttcctcatccttctcc

SEQ ID NO: 3863 - DNA, 19 bp, Artificial Sequence
  Primer
tgccttcctcatccttctc

SEQ ID NO: 3864 - DNA, 19 bp, Artificial Sequence
  Primer
gcatttcctcgcacaacct

SEQ ID NO: 3865 - DNA, 19 bp, Artificial Sequence
  Primer
cttttgccctcttgtcctc

SEQ ID NO: 3866 - DNA, 20 bp, Artificial Sequence
  Primer
tgccttcctcatccttctcc

SEQ ID NO: 3867 - DNA, 18 bp, Artificial Sequence
  Primer
acctttccacattccgca

SEQ ID NO: 3868 - DNA, 20 bp, Artificial Sequence
  Primer
tcagcacaagcaaaagcaaa

SEQ ID NO: 3869 - DNA, 19 bp, Artificial Sequence
  Primer
tcagcacaagcaaaagcaa

SEQ ID NO: 3870 - DNA, 19 bp, Artificial Sequence
  Primer
gtcagcacaagcaaaagca

SEQ ID NO: 3871 - DNA, 20 bp, Artificial Sequence
  Primer
ccaacaaagccaacatctca

SEQ ID NO: 3872 - DNA, 19 bp, Artificial Sequence
  Primer
gcagaaagacacgcaatca

SEQ ID NO: 3873 - DNA, 20 bp, Artificial Sequence
  Primer
acagccataacctttccaca

SEQ ID NO: 3874 - DNA, 21 bp, Artificial Sequence
  Primer
cataatcagggacaacaacca

SEQ ID NO: 3875 - DNA, 22 bp, Artificial Sequence
  Primer
tcctcttcttcttcctcaactc

SEQ ID NO: 3876 - DNA, 21 bp, Artificial Sequence
  Primer
actacagccataacctttcca

SEQ ID NO: 3877 - DNA, 19 bp, Artificial Sequence
  Primer
caccctttgctaactcgct

SEQ ID NO: 3878 - DNA, 22 bp, Artificial Sequence
  Primer
ccacatcaagcctacaatacaa

SEQ ID NO: 3879 - DNA, 19 bp, Artificial Sequence
  Primer
agccacatcaagcctacaa

SEQ ID NO: 3880 - DNA, 25 bp, Artificial Sequence
  Primer
gcaagaataccacgaaagcaagaaa

SEQ ID NO: 3881 - DNA, 24 bp, Artificial Sequence
  Primer
gcaagaataccacgaaagcaagaa

SEQ ID NO: 3882 - DNA, 24 bp, Artificial Sequence
  Primer
agcaagaataccacgaaagcaaga

SEQ ID NO: 3883 - DNA, 20 bp, Artificial Sequence
  Primer
gcacaaacctacctcccttc

SEQ ID NO: 3884 - DNA, 21 bp, Artificial Sequence
  Primer
gacagcagcaagcacaaaaca

SEQ ID NO: 3885 - DNA, 25 bp, Artificial Sequence
  Primer
gcaagaataccacgaaagcaagaaa

SEQ ID NO: 3886 - DNA, 24 bp, Artificial Sequence
  Primer
gcaagaataccacgaaagcaagaa

SEQ ID NO: 3887 - DNA, 23 bp, Artificial Sequence
  Primer
gcaagaataccacgaaagcaaga

SEQ ID NO: 3888 - DNA, 22 bp, Artificial Sequence
  Primer
agcaagaataccacgaaagcaa

SEQ ID NO: 3889 - DNA, 22 bp, Artificial Sequence
  Primer
ccacgaaagcaagaaaaagaag

SEQ ID NO: 3890 - DNA, 18 bp, Artificial Sequence
  Primer
aacagcagcatacagcca

SEQ ID NO: 3891 - DNA, 20 bp, Artificial Sequence
  Primer
agcaaacaagaccctcctac

SEQ ID NO: 3892 - DNA, 22 bp, Artificial Sequence
  Primer
gcaagaataccacgaaagcaag

SEQ ID NO: 3893 - DNA, 19 bp, Artificial Sequence
  Primer
cttttgccctcttgtcctc

SEQ ID NO: 3894 - DNA, 20 bp, Artificial Sequence
  Primer
gaaagcaaacaagaccctcc

SEQ ID NO: 3895 - DNA, 22 bp, Artificial Sequence
  Primer
aagaatcggacaccatagtcaa

SEQ ID NO: 3896 - DNA, 22 bp, Artificial Sequence
  Primer
gaagaatcggacaccatagtca

SEQ ID NO: 3897 - DNA, 22 bp, Artificial Sequence
  Primer
caaatatgcctgctgacaacaa

SEQ ID NO: 3898 - DNA, 20 bp, Artificial Sequence
  Primer
ccaaatatgcctgctgacaa

SEQ ID NO: 3899 - DNA, 20 bp, Artificial Sequence
  Primer
agcaaacaagaccctcctac

SEQ ID NO: 3900 - DNA, 21 bp, Artificial Sequence
  Primer
agaatcggacaccatagtcaa

SEQ ID NO: 3901 - DNA, 20 bp, Artificial Sequence
  Primer
gaaagcaaacaagaccctcc

SEQ ID NO: 3902 - DNA, 21 bp, Artificial Sequence
  Primer
acaacagcatcaccatagtca

SEQ ID NO: 3903 - DNA, 23 bp, Artificial Sequence
  Primer
gcaagaataccacgaaagcaaga

SEQ ID NO: 3904 - DNA, 21 bp, Artificial Sequence
  Primer
acaacagcatcaccatagtca

SEQ ID NO: 3905 - DNA, 21 bp, Artificial Sequence
  Primer
cacaacagcatcaccatagtc

SEQ ID NO: 3906 - DNA, 19 bp, Artificial Sequence
  Primer
gcacagaaggaaagcacag

SEQ ID NO: 3907 - DNA, 20 bp, Artificial Sequence
  Primer
acagcatcaccatagtcacc

SEQ ID NO: 3908 - DNA, 21 bp, Artificial Sequence
  Primer
acacggtaaccagtaaagaca

SEQ ID NO: 3909 - DNA, 20 bp, Artificial Sequence
  Primer
ccagaaagcaaacaagaccc

SEQ ID NO: 3910 - DNA, 23 bp, Artificial Sequence
  Primer
acacaacagcatcaccatagtca

SEQ ID NO: 3911 - DNA, 23 bp, Artificial Sequence
  Primer
acacaacagcatcaccatagtca

SEQ ID NO: 3912 - DNA, 20 bp, Artificial Sequence
  Primer
ccaacaaagccaacatctca

SEQ ID NO: 3913 - DNA, 18 bp, Artificial Sequence
  Primer
gcaagtccgatggcaaaa

SEQ ID NO: 3914 - DNA, 20 bp, Artificial Sequence
  Primer
ccaacaaagccaacatctca

SEQ ID NO: 3915 - DNA, 21 bp, Artificial Sequence
  Primer
acaacagcatcaccatagtca

SEQ ID NO: 3916 - DNA, 18 bp, Artificial Sequence
  Primer
accctttgctaactcgct

SEQ ID NO: 3917 - DNA, 20 bp, Artificial Sequence
  Primer
ccgcaggaagaagagtcaca

SEQ ID NO: 3918 - DNA, 20 bp, Artificial Sequence
  Primer
agccgcaggaagaagagtca

SEQ ID NO: 3919 - DNA, 20 bp, Artificial Sequence
  Primer
ccgcaggaagaagagtcaca

SEQ ID NO: 3920 - DNA, 20 bp, Artificial Sequence
  Primer
agccgcaggaagaagagtca

SEQ ID NO: 3921 - DNA, 20 bp, Artificial Sequence
  Primer
agccgcaggaagaagagtca

SEQ ID NO: 3922 - DNA, 20 bp, Artificial Sequence
  Primer
ccgcaggaagaagagtcaca

SEQ ID NO: 3923 - DNA, 20 bp, Artificial Sequence
  Primer
agccgcaggaagaagagtca

SEQ ID NO: 3924 - DNA, 20 bp, Artificial Sequence
  Primer
ccgcaggaagaagagtcaca

SEQ ID NO: 3925 - DNA, 20 bp, Artificial Sequence
  Primer
atgacagccctctacatcaa

SEQ ID NO: 3926 - DNA, 20 bp, Artificial Sequence
  Primer
tgacagccctctacatcaaa

SEQ ID NO: 3927 - DNA, 20 bp, Artificial Sequence
  Primer
agttaccgcaggactcaaca

SEQ ID NO: 3928 - DNA, 19 bp, Artificial Sequence
  Primer
ccccactgctgaacatcaa

SEQ ID NO: 3929 - DNA, 20 bp, Artificial Sequence
  Primer
atgacagccctctacatcaa

SEQ ID NO: 3930 - DNA, 20 bp, Artificial Sequence
  Primer
tgacagccctctacatcaaa

SEQ ID NO: 3931 - DNA, 20 bp, Artificial Sequence
  Primer
tccagaaagcaaacaagacc

SEQ ID NO: 3932 - DNA, 22 bp, Artificial Sequence
  Primer
gacatagtcaaaacccacagaa

SEQ ID NO: 3933 - DNA, 18 bp, Artificial Sequence
  Primer
accctttgctaactcgct

SEQ ID NO: 3934 - DNA, 20 bp, Artificial Sequence
  Primer
agccgcaggaagaagagtca

SEQ ID NO: 3935 - DNA, 20 bp, Artificial Sequence
  Primer
tgtaagagccagccaaagaa

SEQ ID NO: 3936 - DNA, 19 bp, Artificial Sequence
  Primer
cgcaggaagaagagtcaca

SEQ ID NO: 3937 - DNA, 20 bp, Artificial Sequence
  Primer
agcaaacaagaccctcctac

SEQ ID NO: 3938 - DNA, 20 bp, Artificial Sequence
  Primer
agccgcaggaagaagagtca

SEQ ID NO: 3939 - DNA, 19 bp, Artificial Sequence
  Primer
cgcaggaagaagagtcaca

SEQ ID NO: 3940 - DNA, 19 bp, Artificial Sequence
  Primer
cgcaggaagaagagtcaca

SEQ ID NO: 3941 - DNA, 20 bp, Artificial Sequence
  Primer
agccgcaggaagaagagtca

SEQ ID NO: 3942 - DNA, 19 bp, Artificial Sequence
  Primer
cgcaggaagaagagtcaca

SEQ ID NO: 3943 - DNA, 19 bp, Artificial Sequence
  Primer
tgtaagagccagccaaaga

SEQ ID NO: 3944 - DNA, 20 bp, Artificial Sequence
  Primer
tgccttcctcatccttctcc

SEQ ID NO: 3945 - DNA, 19 bp, Artificial Sequence
  Primer
atgtcagccgcaggaagaa

SEQ ID NO: 3946 - DNA, 20 bp, Artificial Sequence
  Primer
gaaagcaaacaagaccctcc

SEQ ID NO: 3947 - DNA, 20 bp, Artificial Sequence
  Primer
ccagaaagcaaacaagaccc

SEQ ID NO: 3948 - DNA, 20 bp, Artificial Sequence
  Primer
tccagaaagcaaacaagacc

SEQ ID NO: 3949 - DNA, 20 bp, Artificial Sequence
  Primer
agccgcaggaagaagagtca

SEQ ID NO: 3950 - DNA, 19 bp, Artificial Sequence
  Primer
atgtcagccgcaggaagaa

SEQ ID NO: 3951 - DNA, 18 bp, Artificial Sequence
  Primer
catcgcatcaacaccaca

SEQ ID NO: 3952 - DNA, 20 bp, Artificial Sequence
  Primer
agccgcaggaagaagagtca

SEQ ID NO: 3953 - DNA, 19 bp, Artificial Sequence
  Primer
atgtcagccgcaggaagaa

SEQ ID NO: 3954 - DNA, 19 bp, Artificial Sequence
  Primer
cgcaggaagaagagtcaca

SEQ ID NO: 3955 - DNA, 22 bp, Artificial Sequence
  Primer
aaacaagaccctcctactgtaa

SEQ ID NO: 3956 - DNA, 22 bp, Artificial Sequence
  Primer
cactctaccatcaaacaagaca

SEQ ID NO: 3957 - DNA, 19 bp, Artificial Sequence
  Primer
aagcacagaaggaaagcac

SEQ ID NO: 3958 - DNA, 22 bp, Artificial Sequence
  Primer
ccttccactctaccatcaaaca

SEQ ID NO: 3959 - DNA, 22 bp, Artificial Sequence
  Primer
aaacaagaccctcctactgtaa

SEQ ID NO: 3960 - DNA, 19 bp, Artificial Sequence
  Primer
gcacagaaggaaagcacag

SEQ ID NO: 3961 - DNA, 19 bp, Artificial Sequence
  Primer
aagcacagaaggaaagcac

SEQ ID NO: 3962 - DNA, 20 bp, Artificial Sequence
  Primer
ccaaatatgcctgctgacaa

SEQ ID NO: 3963 - DNA, 19 bp, Artificial Sequence
  Primer
ttcatcgcatcaacaccac

SEQ ID NO: 3964 - DNA, 19 bp, Artificial Sequence
  Primer
aagcacagaaggaaagcac

SEQ ID NO: 3965 - DNA, 20 bp, Artificial Sequence
  Primer
gcaaaagcacagaaggaaag

SEQ ID NO: 3966 - DNA, 18 bp, Artificial Sequence
  Primer
aacagcagcatacagcca

SEQ ID NO: 3967 - DNA, 22 bp, Artificial Sequence
  Primer
caaatatgcctgctgacaacaa

SEQ ID NO: 3968 - DNA, 19 bp, Artificial Sequence
  Primer
tgccttcctcatccttctc

SEQ ID NO: 3969 - DNA, 25 bp, Artificial Sequence
  Primer
ccatcaaacaagacagtaagtgaag

SEQ ID NO: 3970 - DNA, 21 bp, Artificial Sequence
  Primer
atcaacaccacagaaaactcc

SEQ ID NO: 3971 - DNA, 20 bp, Artificial Sequence
  Primer
ggcaataataccaccagcca

SEQ ID NO: 3972 - DNA, 20 bp, Artificial Sequence
  Primer
gataacagcagcatacagcc

SEQ ID NO: 3973 - DNA, 22 bp, Artificial Sequence
  Primer
aaacaagaccctcctactgtaa

SEQ ID NO: 3974 - DNA, 20 bp, Artificial Sequence
  Primer
ccaaatatgcctgctgacaa

SEQ ID NO: 3975 - DNA, 21 bp, Artificial Sequence
  Primer
gagaaaaagtggcgagtagag

SEQ ID NO: 3976 - DNA, 18 bp, Artificial Sequence
  Primer
aacagcagcatacagcca

SEQ ID NO: 3977 - DNA, 21 bp, Artificial Sequence
  Primer
atgagaaaaagtggcgagtag

SEQ ID NO: 3978 - DNA, 21 bp, Artificial Sequence
  Primer
acaatgagaaaaagtggcgag

SEQ ID NO: 3979 - DNA, 22 bp, Artificial Sequence
  Primer
tcataaagtagtaggcagcaca

SEQ ID NO: 3980 - DNA, 22 bp, Artificial Sequence
  Primer
cagcaacaatgagaaaaagtgg

SEQ ID NO: 3981 - DNA, 22 bp, Artificial Sequence
  Primer
gagcagcaacaatgagaaaaag

SEQ ID NO: 3982 - DNA, 22 bp, Artificial Sequence
  Primer
catacaaactaccaccatcaca

SEQ ID NO: 3983 - DNA, 22 bp, Artificial Sequence
  Primer
cacatacaaactaccaccatca

SEQ ID NO: 3984 - DNA, 22 bp, Artificial Sequence
  Primer
catacaaactaccaccatcaca

SEQ ID NO: 3985 - DNA, 22 bp, Artificial Sequence
  Primer
gtcagcacaagcaaaagcaaag

SEQ ID NO: 3986 - DNA, 22 bp, Artificial Sequence
  Primer
cacatacaaactaccaccatca

SEQ ID NO: 3987 - DNA, 22 bp, Artificial Sequence
  Primer
caaatatgcctgctgacaacaa

SEQ ID NO: 3988 - DNA, 20 bp, Artificial Sequence
  Primer
ccaaatatgcctgctgacaa

SEQ ID NO: 3989 - DNA, 21 bp, Artificial Sequence
  Primer
aagaatcggacaccatagtca

SEQ ID NO: 3990 - DNA, 19 bp, Artificial Sequence
  Primer
tgaagcaccaccaaaggac

SEQ ID NO: 3991 - DNA, 21 bp, Artificial Sequence
  Primer
agaatcggacaccatagtcaa

SEQ ID NO: 3992 - DNA, 22 bp, Artificial Sequence
  Primer
agagcatagactaaatcagcca

SEQ ID NO: 3993 - DNA, 21 bp, Artificial Sequence
  Primer
tcccaaacagtatcttctcca

SEQ ID NO: 3994 - DNA, 19 bp, Artificial Sequence
  Primer
gcagaaagacacgcaatca

SEQ ID NO: 3995 - DNA, 18 bp, Artificial Sequence
  Primer
taaagccccactgctgaa

SEQ ID NO: 3996 - DNA, 22 bp, Artificial Sequence
  Primer
caaatatgcctgctgacaacaa

SEQ ID NO: 3997 - DNA, 21 bp, Artificial Sequence
  Primer
tcagcacaagcaaaagcaaag

SEQ ID NO: 3998 - DNA, 21 bp, Artificial Sequence
  Primer
gtcagcacaagcaaaagcaaa

SEQ ID NO: 3999 - DNA, 20 bp, Artificial Sequence
  Primer
gtcagcacaagcaaaagcaa

SEQ ID NO: 4000 - DNA, 19 bp, Artificial Sequence
  Primer
tcaatgggatcagtgccaa

SEQ ID NO: 4001 - DNA, 20 bp, Artificial Sequence
  Primer
cagcacaagcaaaagcaaag

SEQ ID NO: 4002 - DNA, 22 bp, Artificial Sequence
  Primer
caaatatgcctgctgacaacaa

SEQ ID NO: 4003 - DNA, 19 bp, Artificial Sequence
  Primer
tcagcacaagcaaaagcaa

SEQ ID NO: 4004 - DNA, 20 bp, Artificial Sequence
  Primer
ccaacataggcaaacacaca

SEQ ID NO: 4005 - DNA, 19 bp, Artificial Sequence
  Primer
agcacagaaggaaagcaca

SEQ ID NO: 4006 - DNA, 20 bp, Artificial Sequence
  Primer
ccaaatatgcctgctgacaa

SEQ ID NO: 4007 - DNA, 18 bp, Artificial Sequence
  Primer
taaagccccactgctgaa

SEQ ID NO: 4008 - DNA, 20 bp, Artificial Sequence
  Primer
gcaccaaatatgcctgctga

SEQ ID NO: 4009 - DNA, 18 bp, Artificial Sequence
  Primer
agcaagaacgcaagcaga

SEQ ID NO: 4010 - DNA, 22 bp, Artificial Sequence
  Primer
gcagaaagacacgcaatcataa

SEQ ID NO: 4011 - DNA, 22 bp, Artificial Sequence
  Primer
gcaatcctgaaagtcctcataa

SEQ ID NO: 4012 - DNA, 21 bp, Artificial Sequence
  Primer
ggcacactgataaacaccaga

SEQ ID NO: 4013 - DNA, 18 bp, Artificial Sequence
  Primer
taaagccccactgctgaa

SEQ ID NO: 4014 - DNA, 19 bp, Artificial Sequence
  Primer
aagccaatccacgcacgaa

SEQ ID NO: 4015 - DNA, 20 bp, Artificial Sequence
  Primer
catcaaagccaatccacgca

SEQ ID NO: 4016 - DNA, 23 bp, Artificial Sequence
  Primer
ccctctacatcaaagccaatcca

SEQ ID NO: 4017 - DNA, 21 bp, Artificial Sequence
  Primer
agccctctacatcaaagccaa

SEQ ID NO: 4018 - DNA, 21 bp, Artificial Sequence
  Primer
cagccctctacatcaaagcca

SEQ ID NO: 4019 - DNA, 20 bp, Artificial Sequence
  Primer
acgcactacattccagggca

SEQ ID NO: 4020 - DNA, 19 bp, Artificial Sequence
  Primer
aagccaatccacgcacgaa

SEQ ID NO: 4021 - DNA, 18 bp, Artificial Sequence
  Primer
tcaaagccaatccacgca

SEQ ID NO: 4022 - DNA, 22 bp, Artificial Sequence
  Primer
cctctacatcaaagccaatcca

SEQ ID NO: 4023 - DNA, 20 bp, Artificial Sequence
  Primer
gccctctacatcaaagccaa

SEQ ID NO: 4024 - DNA, 19 bp, Artificial Sequence
  Primer
gccctctacatcaaagcca

SEQ ID NO: 4025 - DNA, 22 bp, Artificial Sequence
  Primer
gacatagtcaaaacccacagaa

SEQ ID NO: 4026 - DNA, 19 bp, Artificial Sequence
  Primer
aagccaatccacgcacgaa

SEQ ID NO: 4027 - DNA, 18 bp, Artificial Sequence
  Primer
tcaaagccaatccacgca

SEQ ID NO: 4028 - DNA, 22 bp, Artificial Sequence
  Primer
cctctacatcaaagccaatcca

SEQ ID NO: 4029 - DNA, 20 bp, Artificial Sequence
  Primer
gccctctacatcaaagccaa

SEQ ID NO: 4030 - DNA, 19 bp, Artificial Sequence
  Primer
gccctctacatcaaagcca

SEQ ID NO: 4031 - DNA, 24 bp, Artificial Sequence
  Primer
gcatcaccatagtcacctttttca

SEQ ID NO: 4032 - DNA, 21 bp, Artificial Sequence
  Primer
acaacagcatcaccatagtca

SEQ ID NO: 4033 - DNA, 22 bp, Artificial Sequence
  Primer
gttttcttcaccagcatcatca

SEQ ID NO: 4034 - DNA, 25 bp, Artificial Sequence
  Primer
catcaatttcttcttcctcacactc

SEQ ID NO: 4035 - DNA, 24 bp, Artificial Sequence
  Primer
gcatcaccatagtcacctttttca

SEQ ID NO: 4036 - DNA, 23 bp, Artificial Sequence
  Primer
gcatcaccatagtcacctttttc

SEQ ID NO: 4037 - DNA, 20 bp, Artificial Sequence
  Primer
agcaaacaagaccctcctac

SEQ ID NO: 4038 - DNA, 20 bp, Artificial Sequence
  Primer
cgcaagcagaggtagcaaaa

SEQ ID NO: 4039 - DNA, 20 bp, Artificial Sequence
  Primer
gaaagcaaacaagaccctcc

SEQ ID NO: 4040 - DNA, 20 bp, Artificial Sequence
  Primer
agcaaacaagaccctcctac

SEQ ID NO: 4041 - DNA, 22 bp, Artificial Sequence
  Primer
cttttcacatagggcatcaaca

SEQ ID NO: 4042 - DNA, 24 bp, Artificial Sequence
  Primer
gcatcaccatagtcacctttttca

SEQ ID NO: 4043 - DNA, 22 bp, Artificial Sequence
  Primer
gccacaaggttaaagtcattca

SEQ ID NO: 4044 - DNA, 20 bp, Artificial Sequence
  Primer
aaaagcacagaaggaaagca

SEQ ID NO: 4045 - DNA, 20 bp, Artificial Sequence
  Primer
cacttccaacaaagccaaca

SEQ ID NO: 4046 - DNA, 18 bp, Artificial Sequence
  Primer
gcacttccaacaaagcca

SEQ ID NO: 4047 - DNA, 20 bp, Artificial Sequence
  Primer
cgtcaccttcagtaacgaca

SEQ ID NO: 4048 - DNA, 20 bp, Artificial Sequence
  Primer
tatagcagccaacataggca

SEQ ID NO: 4049 - DNA, 23 bp, Artificial Sequence
  Primer
cctatcctcagaataaccaccaa

SEQ ID NO: 4050 - DNA, 19 bp, Artificial Sequence
  Primer
accatagtcaacgatgccc

SEQ ID NO: 4051 - DNA, 22 bp, Artificial Sequence
  Primer
cctatcctcagaataaccacca

SEQ ID NO: 4052 - DNA, 19 bp, Artificial Sequence
  Primer
caccatagtcaacgatgcc

SEQ ID NO: 4053 - DNA, 18 bp, Artificial Sequence
  Primer
aatgcctgaaatgtcgcc

SEQ ID NO: 4054 - DNA, 23 bp, Artificial Sequence
  Primer
cctatcctcagaataaccaccaa

SEQ ID NO: 4055 - DNA, 22 bp, Artificial Sequence
  Primer
cctatcctcagaataaccacca

SEQ ID NO: 4056 - DNA, 19 bp, Artificial Sequence
  Primer
agccgagccaaacatacca

SEQ ID NO: 4057 - DNA, 20 bp, Artificial Sequence
  Primer
tccaagaacacactcagaca

SEQ ID NO: 4058 - DNA, 20 bp, Artificial Sequence
  Primer
cacttccaacaaagccaaca

SEQ ID NO: 4059 - DNA, 18 bp, Artificial Sequence
  Primer
gcacttccaacaaagcca

SEQ ID NO: 4060 - DNA, 23 bp, Artificial Sequence
  Primer
cctatcctcagaataaccaccaa

SEQ ID NO: 4061 - DNA, 22 bp, Artificial Sequence
  Primer
cctatcctcagaataaccacca

SEQ ID NO: 4062 - DNA, 19 bp, Artificial Sequence
  Primer
cgcaggaagaagagtcaca

SEQ ID NO: 4063 - DNA, 21 bp, Artificial Sequence
  Primer
gaagcagacacatctaaagca

SEQ ID NO: 4064 - DNA, 20 bp, Artificial Sequence
  Primer
agccgcaggaagaagagtca

SEQ ID NO: 4065 - DNA, 22 bp, Artificial Sequence
  Primer
gtcagcacaagcaaaagcaaag

SEQ ID NO: 4066 - DNA, 19 bp, Artificial Sequence
  Primer
atgtcagccgcaggaagaa

SEQ ID NO: 4067 - DNA, 20 bp, Artificial Sequence
  Primer
agccgcaggaagaagagtca

SEQ ID NO: 4068 - DNA, 19 bp, Artificial Sequence
  Primer
atgtcagccgcaggaagaa

SEQ ID NO: 4069 - DNA, 20 bp, Artificial Sequence
  Primer
agcagaaaggctaaaaagca

SEQ ID NO: 4070 - DNA, 20 bp, Artificial Sequence
  Primer
agccgcaggaagaagagtca

SEQ ID NO: 4071 - DNA, 21 bp, Artificial Sequence
  Primer
gcagaaaggctaaaaagcaca

SEQ ID NO: 4072 - DNA, 22 bp, Artificial Sequence
  Primer
tcttcctcttcttcttcctcaa

SEQ ID NO: 4073 - DNA, 20 bp, Artificial Sequence
  Primer
agcagaaaggctaaaaagca

SEQ ID NO: 4074 - DNA, 21 bp, Artificial Sequence
  Primer
gcagaaaggctaaaaagcaca

SEQ ID NO: 4075 - DNA, 22 bp, Artificial Sequence
  Primer
cactctaccatcaaacaagaca

SEQ ID NO: 4076 - DNA, 22 bp, Artificial Sequence
  Primer
caaatatgcctgctgacaacaa

SEQ ID NO: 4077 - DNA, 20 bp, Artificial Sequence
  Primer
ccaaatatgcctgctgacaa

SEQ ID NO: 4078 - DNA, 22 bp, Artificial Sequence
  Primer
gacatagtcaaaacccacagaa

SEQ ID NO: 4079 - DNA, 20 bp, Artificial Sequence
  Primer
ccaacataggcaaacacaca

SEQ ID NO: 4080 - DNA, 20 bp, Artificial Sequence
  Primer
attgccttcctcatccttct

SEQ ID NO: 4081 - DNA, 22 bp, Artificial Sequence
  Primer
tcttcctcttcttcttcctcaa

SEQ ID NO: 4082 - DNA, 20 bp, Artificial Sequence
  Primer
gcaccaaatatgcctgctga

SEQ ID NO: 4083 - DNA, 20 bp, Artificial Sequence
  Primer
cccagcaccatacctctatt

SEQ ID NO: 4084 - DNA, 22 bp, Artificial Sequence
  Primer
ccactctaccatcaaacaagac

SEQ ID NO: 4085 - DNA, 24 bp, Artificial Sequence
  Primer
tatagcagccaacataggcaaaca

SEQ ID NO: 4086 - DNA, 25 bp, Artificial Sequence
  Primer
catcaatttcttcttcctcacactc

SEQ ID NO: 4087 - DNA, 20 bp, Artificial Sequence
  Primer
agattcatcgcatcaacacc

SEQ ID NO: 4088 - DNA, 19 bp, Artificial Sequence
  Primer
cgcatcaacaccacagaaa

SEQ ID NO: 4089 - DNA, 18 bp, Artificial Sequence
  Primer
agcaagaacgcaagcaga

SEQ ID NO: 4090 - DNA, 20 bp, Artificial Sequence
  Primer
cgcatcaacaccacagaaaa

SEQ ID NO: 4091 - DNA, 20 bp, Artificial Sequence
  Primer
agccgcaggaagaagagtca

SEQ ID NO: 4092 - DNA, 21 bp, Artificial Sequence
  Primer
cgcatcaacaccacagaaaac

SEQ ID NO: 4093 - DNA, 20 bp, Artificial Sequence
  Primer
attgccttcctcatccttct

SEQ ID NO: 4094 - DNA, 18 bp, Artificial Sequence
  Primer
aacagcagcatacagcca

SEQ ID NO: 4095 - DNA, 23 bp, Artificial Sequence
  Primer
tccactctaccatcaaacaagac

SEQ ID NO: 4096 - DNA, 22 bp, Artificial Sequence
  Primer
tcataaagtagtaggcagcaca

SEQ ID NO: 4097 - DNA, 18 bp, Artificial Sequence
  Primer
tgtgactccattgacgct

SEQ ID NO: 4098 - DNA, 20 bp, Artificial Sequence
  Primer
gccctctacatcaaagccaa

SEQ ID NO: 4099 - DNA, 20 bp, Artificial Sequence
  Primer
gccctctacatcaaagccaa

SEQ ID NO: 4100 - DNA, 20 bp, Artificial Sequence
  Primer
atcagcagaagctccactca

SEQ ID NO: 4101 - DNA, 20 bp, Artificial Sequence
  Primer
atcagcagaagctccactca

SEQ ID NO: 4102 - DNA, 21 bp, Artificial Sequence
  Primer
ccatcttacctttcggtcaca

SEQ ID NO: 4103 - DNA, 19 bp, Artificial Sequence
  Primer
cgcaagcagaggtagcaaa

SEQ ID NO: 4104 - DNA, 24 bp, Artificial Sequence
  Primer
gcatcaccatagtcacctttttca

SEQ ID NO: 4105 - DNA, 21 bp, Artificial Sequence
  Primer
acacggtaaccagtaaagaca

SEQ ID NO: 4106 - DNA, 20 bp, Artificial Sequence
  Primer
ttacatagcccatctgcctt

SEQ ID NO: 4107 - DNA, 20 bp, Artificial Sequence
  Primer
cgtcctcttcttcctcatct

SEQ ID NO: 4108 - DNA, 20 bp, Artificial Sequence
  Primer
atcagcagaagctccactca

SEQ ID NO: 4109 - DNA, 21 bp, Artificial Sequence
  Primer
ctccatcttacctttcggtca

SEQ ID NO: 4110 - DNA, 20 bp, Artificial Sequence
  Primer
gaaagcaaacaagaccctcc

SEQ ID NO: 4111 - DNA, 22 bp, Artificial Sequence
  Primer
ggcatctacaatacagacaaca

SEQ ID NO: 4112 - DNA, 18 bp, Artificial Sequence
  Primer
agcaagtccgatggcaaa

SEQ ID NO: 4113 - DNA, 19 bp, Artificial Sequence
  Primer
caagttaggcatcgcaaca

SEQ ID NO: 4114 - DNA, 19 bp, Artificial Sequence
  Primer
caagttaggcatcgcaaca

SEQ ID NO: 4115 - DNA, 19 bp, Artificial Sequence
  Primer
agcacagaaggaaagcaca

SEQ ID NO: 4116 - DNA, 18 bp, Artificial Sequence
  Primer
agcaagaacgcaagcaga

SEQ ID NO: 4117 - DNA, 18 bp, Artificial Sequence
  Primer
tgcctgaaatgtcgccaa

SEQ ID NO: 4118 - DNA, 18 bp, Artificial Sequence
  Primer
tgcctgaaatgtcgccaa

SEQ ID NO: 4119 - DNA, 18 bp, Artificial Sequence
  Primer
accctttgctaactcgct

SEQ ID NO: 4120 - DNA, 21 bp, Artificial Sequence
  Primer
gccataacctttccacattcc

SEQ ID NO: 4121 - DNA, 22 bp, Artificial Sequence
  Primer
cctgaaatgtcgccaagatcaa

SEQ ID NO: 4122 - DNA, 22 bp, Artificial Sequence
  Primer
gccacaaggttaaagtcattca

SEQ ID NO: 4123 - DNA, 20 bp, Artificial Sequence
  Primer
cgtcctcttcttcctcatct

SEQ ID NO: 4124 - DNA, 21 bp, Artificial Sequence
  Primer
tccaagaacacactcagacat

SEQ ID NO: 4125 - DNA, 24 bp, Artificial Sequence
  Primer
cactcagacattttagtagcagca

SEQ ID NO: 4126 - DNA, 19 bp, Artificial Sequence
  Primer
cagcaagaacgcaagcaga

SEQ ID NO: 4127 - DNA, 19 bp, Artificial Sequence
  Primer
agccgagccaaacatacca

SEQ ID NO: 4128 - DNA, 22 bp, Artificial Sequence
  Primer
gacatagtcaaaacccacagaa

SEQ ID NO: 4129 - DNA, 22 bp, Artificial Sequence
  Primer
gcaggcataagtatctgatgaa

SEQ ID NO: 4130 - DNA, 19 bp, Artificial Sequence
  Primer
tgccttcctcatccttctc

SEQ ID NO: 4131 - DNA, 20 bp, Artificial Sequence
  Primer
aactgtcacctgtcacttct

SEQ ID NO: 4132 - DNA, 23 bp, Artificial Sequence
  Primer
gaagaatcggacaccatagtcaa

SEQ ID NO: 4133 - DNA, 22 bp, Artificial Sequence
  Primer
caagaataccacgaaagcaaga

SEQ ID NO: 4134 - DNA, 20 bp, Artificial Sequence
  Primer
tgccttcctcatccttctcc

SEQ ID NO: 4135 - DNA, 19 bp, Artificial Sequence
  Primer
acacacagcctccaaaaca

SEQ ID NO: 4136 - DNA, 18 bp, Artificial Sequence
  Primer
accctttgctaactcgct

SEQ ID NO: 4137 - DNA, 20 bp, Artificial Sequence
  Primer
tgccttcctcatccttctcc

SEQ ID NO: 4138 - DNA, 22 bp, Artificial Sequence
  Primer
gcaagaataccacgaaagcaag

SEQ ID NO: 4139 - DNA, 20 bp, Artificial Sequence
  Primer
attgccttcctcatccttct

SEQ ID NO: 4140 - DNA, 18 bp, Artificial Sequence
  Primer
tgaagcaccaccaaagga

SEQ ID NO: 4141 - DNA, 20 bp, Artificial Sequence
  Primer
aggttacccgtaaagcccca

SEQ ID NO: 4142 - DNA, 22 bp, Artificial Sequence
  Primer
cataaagtagtaggcagcacaa

SEQ ID NO: 4143 - DNA, 20 bp, Artificial Sequence
  Primer
gctacaccctttgctaactc

SEQ ID NO: 4144 - DNA, 21 bp, Artificial Sequence
  Primer
catatagcagaaagacacgca

SEQ ID NO: 4145 - DNA, 18 bp, Artificial Sequence
  Primer
tgaagcaccaccaaagga

SEQ ID NO: 4146 - DNA, 20 bp, Artificial Sequence
  Primer
aaaagcacagaaggaaagca

SEQ ID NO: 4147 - DNA, 18 bp, Artificial Sequence
  Primer
accctttgctaactcgct

SEQ ID NO: 4148 - DNA, 22 bp, Artificial Sequence
  Primer
tcttcctcttcttcttcctcaa

SEQ ID NO: 4149 - DNA, 20 bp, Artificial Sequence
  Primer
gcaagaataccacgaaagca

SEQ ID NO: 4150 - DNA, 20 bp, Artificial Sequence
  Primer
acctccaatacccaacaact

SEQ ID NO: 4151 - DNA, 19 bp, Artificial Sequence
  Primer
tgccttcctcatccttctc

SEQ ID NO: 4152 - DNA, 20 bp, Artificial Sequence
  Primer
tgccttcctcatccttctcc

SEQ ID NO: 4153 - DNA, 20 bp, Artificial Sequence
  Primer
gtagtaggcagcacaagtca

SEQ ID NO: 4154 - DNA, 19 bp, Artificial Sequence
  Primer
tgccttcctcatccttctc

SEQ ID NO: 4155 - DNA, 20 bp, Artificial Sequence
  Primer
cgagcaaacagcctgaagga

SEQ ID NO: 4156 - DNA, 20 bp, Artificial Sequence
  Primer
gagcaaacagcctgaaggaa

SEQ ID NO: 4157 - DNA, 20 bp, Artificial Sequence
  Primer
aaacagcctgaaggaagcaa

SEQ ID NO: 4158 - DNA, 19 bp, Artificial Sequence
  Primer
agcctgaaggaagcaacga

SEQ ID NO: 4159 - DNA, 19 bp, Artificial Sequence
  Primer
gcctgaaggaagcaacgaa

SEQ ID NO: 4160 - DNA, 20 bp, Artificial Sequence
  Primer
tgccttcctcatccttctcc

SEQ ID NO: 4161 - DNA, 22 bp, Artificial Sequence
  Primer
gcaagaataccacgaaagcaag

SEQ ID NO: 4162 - DNA, 19 bp, Artificial Sequence
  Primer
taggcagcacaagtcacca

SEQ ID NO: 4163 - DNA, 21 bp, Artificial Sequence
  Primer
tccttccactctaccatcaaa

SEQ ID NO: 4164 - DNA, 20 bp, Artificial Sequence
  Primer
tgccttcctcatccttctcc

SEQ ID NO: 4165 - DNA, 20 bp, Artificial Sequence
  Primer
cgagcaaacagcctgaagga

SEQ ID NO: 4166 - DNA, 21 bp, Artificial Sequence
  Primer
cgagcaaacagcctgaaggaa

SEQ ID NO: 4167 - DNA, 22 bp, Artificial Sequence
  Primer
gcaaacagcctgaaggaagcaa

SEQ ID NO: 4168 - DNA, 20 bp, Artificial Sequence
  Primer
cagcctgaaggaagcaacga

SEQ ID NO: 4169 - DNA, 21 bp, Artificial Sequence
  Primer
cagcctgaaggaagcaacgaa

SEQ ID NO: 4170 - DNA, 20 bp, Artificial Sequence
  Primer
acgcactacattccagggca

SEQ ID NO: 4171 - DNA, 18 bp, Artificial Sequence
  Primer
accctttgctaactcgct

SEQ ID NO: 4172 - DNA, 22 bp, Artificial Sequence
  Primer
caaatatgcctgctgacaacaa

SEQ ID NO: 4173 - DNA, 22 bp, Artificial Sequence
  Primer
cttccactctaccatcaaacaa

SEQ ID NO: 4174 - DNA, 19 bp, Artificial Sequence
  Primer
agcacagaaggaaagcaca

SEQ ID NO: 4175 - DNA, 21 bp, Artificial Sequence
  Primer
gtccatccttacaccaaagca

SEQ ID NO: 4176 - DNA, 20 bp, Artificial Sequence
  Primer
cccagcaccatacctctatt

SEQ ID NO: 4177 - DNA, 21 bp, Artificial Sequence
  Primer
aactgtcacctgtcacttcta

SEQ ID NO: 4178 - DNA, 22 bp, Artificial Sequence
  Primer
acctggaagtcaacaagatgaa

SEQ ID NO: 4179 - DNA, 22 bp, Artificial Sequence
  Primer
catatagcagaaagacacgcaa

SEQ ID NO: 4180 - DNA, 22 bp, Artificial Sequence
  Primer
cctggaagtcaacaagatgaaa

SEQ ID NO: 4181 - DNA, 20 bp, Artificial Sequence
  Primer
tgcaaaagcacagaaggaaa

SEQ ID NO: 4182 - DNA, 18 bp, Artificial Sequence
  Primer
acgagcaaacagcctgaa

SEQ ID NO: 4183 - DNA, 18 bp, Artificial Sequence
  Primer
tgccagcctgaacaagaa

SEQ ID NO: 4184 - DNA, 20 bp, Artificial Sequence
  Primer
ctgcaaaagcacagaaggaa

SEQ ID NO: 4185 - DNA, 19 bp, Artificial Sequence
  Primer
ttcatcgcatcaacaccac

SEQ ID NO: 4186 - DNA, 21 bp, Artificial Sequence
  Primer
ccaaaaaggcacaataggaga

SEQ ID NO: 4187 - DNA, 18 bp, Artificial Sequence
  Primer
aacagcagcatacagcca

SEQ ID NO: 4188 - DNA, 19 bp, Artificial Sequence
  Primer
cagcagcaagcacaaaaca

SEQ ID NO: 4189 - DNA, 22 bp, Artificial Sequence
  Primer
ccaaaaaggcacaataggagaa

SEQ ID NO: 4190 - DNA, 18 bp, Artificial Sequence
  Primer
ccgtcagcacaagcaaaa

SEQ ID NO: 4191 - DNA, 22 bp, Artificial Sequence
  Primer
cataaagtagtaggcagcacaa

SEQ ID NO: 4192 - DNA, 20 bp, Artificial Sequence
  Primer
gataacagcagcatacagcc

SEQ ID NO: 4193 - DNA, 25 bp, Artificial Sequence
  Primer
gcagaaagacacgcaatcataatca

SEQ ID NO: 4194 - DNA, 21 bp, Artificial Sequence
  Primer
cccagcaccatacctctattt

SEQ ID NO: 4195 - DNA, 19 bp, Artificial Sequence
  Primer
ccgtcagcacaagcaaaag

SEQ ID NO: 4196 - DNA, 22 bp, Artificial Sequence
  Primer
actactctaacagaaccctcca

SEQ ID NO: 4197 - DNA, 21 bp, Artificial Sequence
  Primer
ccaaaaaggcacaataggaga

SEQ ID NO: 4198 - DNA, 22 bp, Artificial Sequence
  Primer
ccaaaaaggcacaataggagaa

SEQ ID NO: 4199 - DNA, 20 bp, Artificial Sequence
  Primer
gataacagcagcatacagcc

SEQ ID NO: 4200 - DNA, 18 bp, Artificial Sequence
  Primer
taccgtcagcacaagcaa

SEQ ID NO: 4201 - DNA, 18 bp, Artificial Sequence
  Primer
accgtcagcacaagcaaa

SEQ ID NO: 4202 - DNA, 18 bp, Artificial Sequence
  Primer
ccgtcagcacaagcaaaa

SEQ ID NO: 4203 - DNA, 22 bp, Artificial Sequence
  Primer
gcagaaagacacgcaatcataa

SEQ ID NO: 4204 - DNA, 19 bp, Artificial Sequence
  Primer
gcagaaagacacgcaatca

SEQ ID NO: 4205 - DNA, 22 bp, Artificial Sequence
  Primer
tccttccactctaccatcaaac

SEQ ID NO: 4206 - DNA, 20 bp, Artificial Sequence
  Primer
cagcacaagcaaaagcaaag

SEQ ID NO: 4207 - DNA, 18 bp, Artificial Sequence
  Primer
aacagcagcatacagcca

SEQ ID NO: 4208 - DNA, 20 bp, Artificial Sequence
  Primer
acagcatcaccatagtcacc

SEQ ID NO: 4209 - DNA, 21 bp, Artificial Sequence
  Primer
cacaacagcatcaccatagtc

SEQ ID NO: 4210 - DNA, 21 bp, Artificial Sequence
  Primer
gcaaacacacagcctccaaaa

SEQ ID NO: 4211 - DNA, 20 bp, Artificial Sequence
  Primer
acagcatcaccatagtcacc

SEQ ID NO: 4212 - DNA, 19 bp, Artificial Sequence
  Primer
ccgtcagcacaagcaaaag

SEQ ID NO: 4213 - DNA, 22 bp, Artificial Sequence
  Primer
caaacacacagcctccaaaaca

SEQ ID NO: 4214 - DNA, 20 bp, Artificial Sequence
  Primer
cgtcctcttcttcctcatct

SEQ ID NO: 4215 - DNA, 20 bp, Artificial Sequence
  Primer
tccagaaagcaaacaagacc

SEQ ID NO: 4216 - DNA, 20 bp, Artificial Sequence
  Primer
acacatctaaagcacccaca

SEQ ID NO: 4217 - DNA, 19 bp, Artificial Sequence
  Primer
ttcatcgcatcaacaccac

SEQ ID NO: 4218 - DNA, 22 bp, Artificial Sequence
  Primer
gccattttcctaaaaccactct

SEQ ID NO: 4219 - DNA, 20 bp, Artificial Sequence
  Primer
gtagtaggcagcacaagtca

SEQ ID NO: 4220 - DNA, 20 bp, Artificial Sequence
  Primer
gcaataataccaccagccac

SEQ ID NO: 4221 - DNA, 20 bp, Artificial Sequence
  Primer
gataacagcagcatacagcc

SEQ ID NO: 4222 - DNA, 19 bp, Artificial Sequence
  Primer
acaactgtcacctgtcact

SEQ ID NO: 4223 - DNA, 22 bp, Artificial Sequence
  Primer
cataaagtagtaggcagcacaa

SEQ ID NO: 4224 - DNA, 22 bp, Artificial Sequence
  Primer
aaacaagaccctcctactgtaa

SEQ ID NO: 4225 - DNA, 20 bp, Artificial Sequence
  Primer
caactgtcacctgtcacttc

SEQ ID NO: 4226 - DNA, 19 bp, Artificial Sequence
  Primer
gcatcgtcctcttcttcct

SEQ ID NO: 4227 - DNA, 18 bp, Artificial Sequence
  Primer
tgaagcaccaccaaagga

SEQ ID NO: 4228 - DNA, 21 bp, Artificial Sequence
  Primer
tcagtagtatcatccagccag

SEQ ID NO: 4229 - DNA, 22 bp, Artificial Sequence
  Primer
caataataccaccagccactac

SEQ ID NO: 4230 - DNA, 19 bp, Artificial Sequence
  Primer
ccgtcagcacaagcaaaag

SEQ ID NO: 4231 - DNA, 18 bp, Artificial Sequence
  Primer
gccaccgtaaaacttgct

SEQ ID NO: 4232 - DNA, 20 bp, Artificial Sequence
  Primer
gacacatctaaagcacccac

SEQ ID NO: 4233 - DNA, 20 bp, Artificial Sequence
  Primer
tgcaaaagcacagaaggaaa

SEQ ID NO: 4234 - DNA, 23 bp, Artificial Sequence
  Primer
caaacaagaccctcctactgtaa

SEQ ID NO: 4235 - DNA, 23 bp, Artificial Sequence
  Primer
ttactactctaacagaaccctcc

SEQ ID NO: 4236 - DNA, 21 bp, Artificial Sequence
  Primer
tcagtagtatcatccagccag

SEQ ID NO: 4237 - DNA, 20 bp, Artificial Sequence
  Primer
tcgtcctcttcttcctcatc

SEQ ID NO: 4238 - DNA, 21 bp, Artificial Sequence
  Primer
gtcaacaatttcagcaggaca

SEQ ID NO: 4239 - DNA, 21 bp, Artificial Sequence
  Primer
agaatcggacaccatagtcaa

SEQ ID NO: 4240 - DNA, 21 bp, Artificial Sequence
  Primer
aagaatcggacaccatagtca

SEQ ID NO: 4241 - DNA, 20 bp, Artificial Sequence
  Primer
gctcttgttgaacctcctct

SEQ ID NO: 4242 - DNA, 20 bp, Artificial Sequence
  Primer
tgttgaacctcctcttgtct

SEQ ID NO: 4243 - DNA, 20 bp, Artificial Sequence
  Primer
gctcttgttgaacctcctct

SEQ ID NO: 4244 - DNA, 20 bp, Artificial Sequence
  Primer
tgttgaacctcctcttgtct

SEQ ID NO: 4245 - DNA, 19 bp, Artificial Sequence
  Primer
aagccaatccacgcacgaa

SEQ ID NO: 4246 - DNA, 19 bp, Artificial Sequence
  Primer
aagccaatccacgcacgaa

SEQ ID NO: 4247 - DNA, 19 bp, Artificial Sequence
  Primer
gccctctacatcaaagcca

SEQ ID NO: 4248 - DNA, 22 bp, Artificial Sequence
  Primer
cctctacatcaaagccaatcca

SEQ ID NO: 4249 - DNA, 20 bp, Artificial Sequence
  Primer
gctcttgttgaacctcctct

SEQ ID NO: 4250 - DNA, 20 bp, Artificial Sequence
  Primer
tgttgaacctcctcttgtct

SEQ ID NO: 4251 - DNA, 18 bp, Artificial Sequence
  Primer
tcaaagccaatccacgca

SEQ ID NO: 4252 - DNA, 19 bp, Artificial Sequence
  Primer
aagcacagaaggaaagcac

SEQ ID NO: 4253 - DNA, 21 bp, Artificial Sequence
  Primer
ttacaactgtcacctgtcact

SEQ ID NO: 4254 - DNA, 20 bp, Artificial Sequence
  Primer
ccagaaagcaaacaagaccc

SEQ ID NO: 4255 - DNA, 20 bp, Artificial Sequence
  Primer
gaaagcaaacaagaccctcc

SEQ ID NO: 4256 - DNA, 20 bp, Artificial Sequence
  Primer
agcaaacaagaccctcctac

SEQ ID NO: 4257 - DNA, 20 bp, Artificial Sequence
  Primer
tcgactgcaacacggacgaa

SEQ ID NO: 4258 - DNA, 22 bp, Artificial Sequence
  Primer
ccaaaaaggcacaataggagaa

SEQ ID NO: 4259 - DNA, 19 bp, Artificial Sequence
  Primer
tgatgaggagcgagaagag

SEQ ID NO: 4260 - DNA, 21 bp, Artificial Sequence
  Primer
tgaaggtgagccaagaatgaa

SEQ ID NO: 4261 - DNA, 20 bp, Artificial Sequence
  Primer
caactgtcacctgtcacttc

SEQ ID NO: 4262 - DNA, 21 bp, Artificial Sequence
  Primer
gaaggtgagccaagaatgaaa

SEQ ID NO: 4263 - DNA, 20 bp, Artificial Sequence
  Primer
gcaaaagcacagaaggaaag

SEQ ID NO: 4264 - DNA, 20 bp, Artificial Sequence
  Primer
ccagaaagcaaacaagaccc

SEQ ID NO: 4265 - DNA, 20 bp, Artificial Sequence
  Primer
gcgtaaaactcatccacgaa

SEQ ID NO: 4266 - DNA, 20 bp, Artificial Sequence
  Primer
gaaagcaaacaagaccctcc

SEQ ID NO: 4267 - DNA, 20 bp, Artificial Sequence
  Primer
tgcaaaagcacagaaggaaa

SEQ ID NO: 4268 - DNA, 20 bp, Artificial Sequence
  Primer
agcaaacaagaccctcctac

SEQ ID NO: 4269 - DNA, 20 bp, Artificial Sequence
  Primer
ctgcaaaagcacagaaggaa

SEQ ID NO: 4270 - DNA, 19 bp, Artificial Sequence
  Primer
tgatgaggagcgagaagag

SEQ ID NO: 4271 - DNA, 20 bp, Artificial Sequence
  Primer
tgatgaggagcgagaagagg

SEQ ID NO: 4272 - DNA, 19 bp, Artificial Sequence
  Primer
gcagaaagacacgcaatca

SEQ ID NO: 4273 - DNA, 19 bp, Artificial Sequence
  Primer
aagcacagaaggaaagcac

SEQ ID NO: 4274 - DNA, 20 bp, Artificial Sequence
  Primer
gcaccaaatatgcctgctga

SEQ ID NO: 4275 - DNA, 21 bp, Artificial Sequence
  Primer
agttacttttgccctcttgtc

SEQ ID NO: 4276 - DNA, 20 bp, Artificial Sequence
  Primer
gtgatgaggagcgagaagag

SEQ ID NO: 4277 - DNA, 20 bp, Artificial Sequence
  Primer
tgatgaggagcgagaagagg

SEQ ID NO: 4278 - DNA, 20 bp, Artificial Sequence
  Primer
ccaaatatgcctgctgacaa

SEQ ID NO: 4279 - DNA, 19 bp, Artificial Sequence
  Primer
gcacagaaggaaagcacag

SEQ ID NO: 4280 - DNA, 22 bp, Artificial Sequence
  Primer
caaatatgcctgctgacaacaa

SEQ ID NO: 4281 - DNA, 20 bp, Artificial Sequence
  Primer
gcaccaaatatgcctgctga

SEQ ID NO: 4282 - DNA, 20 bp, Artificial Sequence
  Primer
ccaaatatgcctgctgacaa

SEQ ID NO: 4283 - DNA, 22 bp, Artificial Sequence
  Primer
gcagaaagacacgcaatcataa

SEQ ID NO: 4284 - DNA, 21 bp, Artificial Sequence
  Primer
cgttcacgactcagtatctca

SEQ ID NO: 4285 - DNA, 20 bp, Artificial Sequence
  Primer
gataacagcagcatacagcc

SEQ ID NO: 4286 - DNA, 25 bp, Artificial Sequence
  Primer
gagcaagcatttctctcaaattcca

SEQ ID NO: 4287 - DNA, 22 bp, Artificial Sequence
  Primer
gtcttcctcttcttcttcctca

SEQ ID NO: 4288 - DNA, 20 bp, Artificial Sequence
  Primer
acgcactacattccagggca

SEQ ID NO: 4289 - DNA, 22 bp, Artificial Sequence
  Primer
gtggcatctacaatacagacaa

SEQ ID NO: 4290 - DNA, 19 bp, Artificial Sequence
  Primer
gcaaacacacagcctccaa

SEQ ID NO: 4291 - DNA, 20 bp, Artificial Sequence
  Primer
caaacacacagcctccaaaa

SEQ ID NO: 4292 - DNA, 20 bp, Artificial Sequence
  Primer
atcagcagaagctccactca

SEQ ID NO: 4293 - DNA, 19 bp, Artificial Sequence
  Primer
caaacacacagcctccaaa

SEQ ID NO: 4294 - DNA, 20 bp, Artificial Sequence
  Primer
agccgcaggaagaagagtca

SEQ ID NO: 4295 - DNA, 21 bp, Artificial Sequence
  Primer
caaaagcacagaaggaaagca

SEQ ID NO: 4296 - DNA, 20 bp, Artificial Sequence
  Primer
atcagcagaagctccactca

SEQ ID NO: 4297 - DNA, 19 bp, Artificial Sequence
  Primer
tactgacactacggcagga

SEQ ID NO: 4298 - DNA, 20 bp, Artificial Sequence
  Primer
gttttccacataagcagcca

SEQ ID NO: 4299 - DNA, 20 bp, Artificial Sequence
  Primer
atcagcagaagctccactca

SEQ ID NO: 4300 - DNA, 19 bp, Artificial Sequence
  Primer
agcagcaagaacgcaagca

SEQ ID NO: 4301 - DNA, 20 bp, Artificial Sequence
  Primer
gccagtaaaccaggagacaa

SEQ ID NO: 4302 - DNA, 18 bp, Artificial Sequence
  Primer
ccgcatcaacaacttgct

SEQ ID NO: 4303 - DNA, 20 bp, Artificial Sequence
  Primer
caaacacacagcctccaaaa

SEQ ID NO: 4304 - DNA, 20 bp, Artificial Sequence
  Primer
atcagcagaagctccactca

SEQ ID NO: 4305 - DNA, 19 bp, Artificial Sequence
  Primer
caaacacacagcctccaaa

SEQ ID NO: 4306 - DNA, 20 bp, Artificial Sequence
  Primer
gcacaaacctacctcccttc

SEQ ID NO: 4307 - DNA, 19 bp, Artificial Sequence
  Primer
gcaaacacacagcctccaa

SEQ ID NO: 4308 - DNA, 19 bp, Artificial Sequence
  Primer
cttttgccctcttgtcctc

SEQ ID NO: 4309 - DNA, 19 bp, Artificial Sequence
  Primer
ccaagaacaaggctctcca

SEQ ID NO: 4310 - DNA, 20 bp, Artificial Sequence
  Primer
cccagcaccatacctctatt

SEQ ID NO: 4311 - DNA, 21 bp, Artificial Sequence
  Primer
cacaacagcatcaccatagtc

SEQ ID NO: 4312 - DNA, 19 bp, Artificial Sequence
  Primer
tgccagcctgaacaagaaa

SEQ ID NO: 4313 - DNA, 20 bp, Artificial Sequence
  Primer
ctgcaaaagcacagaaggaa

SEQ ID NO: 4314 - DNA, 20 bp, Artificial Sequence
  Primer
gcaccaaatatgcctgctga

SEQ ID NO: 4315 - DNA, 20 bp, Artificial Sequence
  Primer
acctccaatacccaacaact

SEQ ID NO: 4316 - DNA, 22 bp, Artificial Sequence
  Primer
aaacaagaccctcctactgtaa

SEQ ID NO: 4317 - DNA, 20 bp, Artificial Sequence
  Primer
gctacaccctttgctaactc

SEQ ID NO: 4318 - DNA, 20 bp, Artificial Sequence
  Primer
atcagcagaagctccactca

SEQ ID NO: 4319 - DNA, 21 bp, Artificial Sequence
  Primer
gttacttttgccctcttgtcc

SEQ ID NO: 4320 - DNA, 19 bp, Artificial Sequence
  Primer
agccgagccaaacatacca

SEQ ID NO: 4321 - DNA, 20 bp, Artificial Sequence
  Primer
atcagcagaagctccactca

SEQ ID NO: 4322 - DNA, 25 bp, Artificial Sequence
  Primer
gagcaagcatttctctcaaattcca

SEQ ID NO: 4323 - DNA, 22 bp, Artificial Sequence
  Primer
caaatatgcctgctgacaacaa

SEQ ID NO: 4324 - DNA, 20 bp, Artificial Sequence
  Primer
ccaaatatgcctgctgacaa

SEQ ID NO: 4325 - DNA, 19 bp, Artificial Sequence
  Primer
atgtcagccgcaggaagaa

SEQ ID NO: 4326 - DNA, 22 bp, Artificial Sequence
  Primer
gatgccaataacgacatcacaa

SEQ ID NO: 4327 - DNA, 20 bp, Artificial Sequence
  Primer
gcaccaaatatgcctgctga

SEQ ID NO: 4328 - DNA, 25 bp, Artificial Sequence
  Primer
gcagaaagacacgcaatcataatca

SEQ ID NO: 4329 - DNA, 19 bp, Artificial Sequence
  Primer
ttcatcgcatcaacaccac

SEQ ID NO: 4330 - DNA, 20 bp, Artificial Sequence
  Primer
gccagtaaaccaggagacaa

SEQ ID NO: 4331 - DNA, 21 bp, Artificial Sequence
  Primer
agttacttttgccctcttgtc

SEQ ID NO: 4332 - DNA, 22 bp, Artificial Sequence
  Primer
caaatatgcctgctgacaacaa

SEQ ID NO: 4333 - DNA, 20 bp, Artificial Sequence
  Primer
ccaaatatgcctgctgacaa

SEQ ID NO: 4334 - DNA, 20 bp, Artificial Sequence
  Primer
tccaagaacacactcagaca

SEQ ID NO: 4335 - DNA, 25 bp, Artificial Sequence
  Primer
gctcatgtcaaagagtgaataggaa

SEQ ID NO: 4336 - DNA, 20 bp, Artificial Sequence
  Primer
gcaccaaatatgcctgctga

SEQ ID NO: 4337 - DNA, 22 bp, Artificial Sequence
  Primer
aaacaagaccctcctactgtaa

SEQ ID NO: 4338 - DNA, 22 bp, Artificial Sequence
  Primer
gttttcttcaccagcatcatca

SEQ ID NO: 4339 - DNA, 19 bp, Artificial Sequence
  Primer
cgcaggaagaagagtcaca

SEQ ID NO: 4340 - DNA, 21 bp, Artificial Sequence
  Primer
catatagcagaaagacacgca

SEQ ID NO: 4341 - DNA, 22 bp, Artificial Sequence
  Primer
gccattttcctaaaaccactct

SEQ ID NO: 4342 - DNA, 20 bp, Artificial Sequence
  Primer
cgtcaccttcagtaacgaca

SEQ ID NO: 4343 - DNA, 22 bp, Artificial Sequence
  Primer
gcccaaaagattagacaaccac

SEQ ID NO: 4344 - DNA, 20 bp, Artificial Sequence
  Primer
gataacagcagcatacagcc

SEQ ID NO: 4345 - DNA, 20 bp, Artificial Sequence
  Primer
gataacagcagcatacagcc

SEQ ID NO: 4346 - DNA, 20 bp, Artificial Sequence
  Primer
gccttcctcatccttctcct

SEQ ID NO: 4347 - DNA, 20 bp, Artificial Sequence
  Primer
caactgtcacctgtcacttc

SEQ ID NO: 4348 - DNA, 19 bp, Artificial Sequence
  Primer
acaactgtcacctgtcact

SEQ ID NO: 4349 - DNA, 22 bp, Artificial Sequence
  Primer
gacatagtcaaaacccacagaa

SEQ ID NO: 4350 - DNA, 22 bp, Artificial Sequence
  Primer
gcaggcataagtatctgatgaa

SEQ ID NO: 4351 - DNA, 19 bp, Artificial Sequence
  Primer
atgtcagccgcaggaagaa

SEQ ID NO: 4352 - DNA, 20 bp, Artificial Sequence
  Primer
gcgacaagcaaaagatgtga

SEQ ID NO: 4353 - DNA, 21 bp, Artificial Sequence
  Primer
gcgacaagcaaaagatgtgaa

SEQ ID NO: 4354 - DNA, 19 bp, Artificial Sequence
  Primer
atgtcagccgcaggaagaa

SEQ ID NO: 4355 - DNA, 25 bp, Artificial Sequence
  Primer
gcgacaagcaaaagatgtgaataga

SEQ ID NO: 4356 - DNA, 23 bp, Artificial Sequence
  Primer
agaagaatcggacaccatagtca

SEQ ID NO: 4357 - DNA, 19 bp, Artificial Sequence
  Primer
atgtcagccgcaggaagaa

SEQ ID NO: 4358 - DNA, 19 bp, Artificial Sequence
  Primer
caaacacacagcctccaaa

SEQ ID NO: 4359 - DNA, 22 bp, Artificial Sequence
  Primer
gtcttcctcttcttcttcctca

SEQ ID NO: 4360 - DNA, 25 bp, Artificial Sequence
  Primer
gggcatcagcaatgagtaatatgaa

SEQ ID NO: 4361 - DNA, 20 bp, Artificial Sequence
  Primer
caaacacacagcctccaaaa

SEQ ID NO: 4362 - DNA, 21 bp, Artificial Sequence
  Primer
gaaggtgagccaagaatgaaa

SEQ ID NO: 4363 - DNA, 19 bp, Artificial Sequence
  Primer
caccatagtcaacgatgcc

SEQ ID NO: 4364 - DNA, 18 bp, Artificial Sequence
  Primer
acctttccacattccgca

SEQ ID NO: 4365 - DNA, 19 bp, Artificial Sequence
  Primer
caccatagtcaacgatgcc

SEQ ID NO: 4366 - DNA, 19 bp, Artificial Sequence
  Primer
aggcagcacaagtcaccaa

SEQ ID NO: 4367 - DNA, 22 bp, Artificial Sequence
  Primer
aaacaagaccctcctactgtaa

SEQ ID NO: 4368 - DNA, 18 bp, Artificial Sequence
  Primer
acctttccacattccgca

SEQ ID NO: 4369 - DNA, 19 bp, Artificial Sequence
  Primer
acaacagcctctgctacaa

SEQ ID NO: 4370 - DNA, 20 bp, Artificial Sequence
  Primer
tcaacaccacagaaaactcc

SEQ ID NO: 4371 - DNA, 19 bp, Artificial Sequence
  Primer
accatagtcaacgatgccc

SEQ ID NO: 4372 - DNA, 22 bp, Artificial Sequence
  Primer
caaatatgcctgctgacaacaa

SEQ ID NO: 4373 - DNA, 20 bp, Artificial Sequence
  Primer
ccaaatatgcctgctgacaa

SEQ ID NO: 4374 - DNA, 20 bp, Artificial Sequence
  Primer
gcaccaaatatgcctgctga

SEQ ID NO: 4375 - DNA, 21 bp, Artificial Sequence
  Primer
tcccaaacagtatcttctcca

SEQ ID NO: 4376 - DNA, 21 bp, Artificial Sequence
  Primer
tctacatcaaagccaatccac

SEQ ID NO: 4377 - DNA, 20 bp, Artificial Sequence
  Primer
tccacaataggaactccgca

SEQ ID NO: 4378 - DNA, 19 bp, Artificial Sequence
  Primer
caccatagtcaacgatgcc

SEQ ID NO: 4379 - DNA, 20 bp, Artificial Sequence
  Primer
acagccataacctttccaca

SEQ ID NO: 4380 - DNA, 19 bp, Artificial Sequence
  Primer
accatagtcaacgatgccc

SEQ ID NO: 4381 - DNA, 19 bp, Artificial Sequence
  Primer
cctaatacaggcaccgcaa

SEQ ID NO: 4382 - DNA, 21 bp, Artificial Sequence
  Primer
cataatcagggacaacaacca

SEQ ID NO: 4383 - DNA, 22 bp, Artificial Sequence
  Primer
ctgatagtaatgccagcacaaa

SEQ ID NO: 4384 - DNA, 21 bp, Artificial Sequence
  Primer
tctacatcaaagccaatccac

SEQ ID NO: 4385 - DNA, 18 bp, Artificial Sequence
  Primer
tcaaagccaatccacgca

SEQ ID NO: 4386 - DNA, 21 bp, Artificial Sequence
  Primer
actacagccataacctttcca

SEQ ID NO: 4387 - DNA, 19 bp, Artificial Sequence
  Primer
gccctctacatcaaagcca

SEQ ID NO: 4388 - DNA, 20 bp, Artificial Sequence
  Primer
gccctctacatcaaagccaa

SEQ ID NO: 4389 - DNA, 22 bp, Artificial Sequence
  Primer
cctctacatcaaagccaatcca

SEQ ID NO: 4390 - DNA, 18 bp, Artificial Sequence
  Primer
tcaaagccaatccacgca

SEQ ID NO: 4391 - DNA, 19 bp, Artificial Sequence
  Primer
aagccaatccacgcacgaa

SEQ ID NO: 4392 - DNA, 20 bp, Artificial Sequence
  Primer
acgcactacattccagggca

SEQ ID NO: 4393 - DNA, 20 bp, Artificial Sequence
  Primer
acaccatagtcaacgatgcc

SEQ ID NO: 4394 - DNA, 20 bp, Artificial Sequence
  Primer
ccaaatatgcctgctgacaa

SEQ ID NO: 4395 - DNA, 22 bp, Artificial Sequence
  Primer
caaatatgcctgctgacaacaa

SEQ ID NO: 4396 - DNA, 21 bp, Artificial Sequence
  Primer
caacggcatcatcagaaagaa

SEQ ID NO: 4397 - DNA, 21 bp, Artificial Sequence
  Primer
tctacatcaaagccaatccac

SEQ ID NO: 4398 - DNA, 18 bp, Artificial Sequence
  Primer
tgaagcaccaccaaagga

SEQ ID NO: 4399 - DNA, 20 bp, Artificial Sequence
  Primer
gcaccaaatatgcctgctga

SEQ ID NO: 4400 - DNA, 19 bp, Artificial Sequence
  Primer
tcaaagccaatccacgcac

SEQ ID NO: 4401 - DNA, 22 bp, Artificial Sequence
  Primer
gagcagcaacaatgagaaaaag

SEQ ID NO: 4402 - DNA, 20 bp, Artificial Sequence
  Primer
ccagaaagcaaacaagaccc

SEQ ID NO: 4403 - DNA, 20 bp, Artificial Sequence
  Primer
tccagaaagcaaacaagacc

SEQ ID NO: 4404 - DNA, 20 bp, Artificial Sequence
  Primer
aagccaatccacgcacgaac

SEQ ID NO: 4405 - DNA, 20 bp, Artificial Sequence
  Primer
ccaaatatgcctgctgacaa

SEQ ID NO: 4406 - DNA, 19 bp, Artificial Sequence
  Primer
ccccactgctgaacatcaa

SEQ ID NO: 4407 - DNA, 22 bp, Artificial Sequence
  Primer
acatacaaactaccaccatcac

SEQ ID NO: 4408 - DNA, 20 bp, Artificial Sequence
  Primer
ccagaaagcaaacaagaccc

SEQ ID NO: 4409 - DNA, 22 bp, Artificial Sequence
  Primer
acatacaaactaccaccatcac

SEQ ID NO: 4410 - DNA, 20 bp, Artificial Sequence
  Primer
tccagaaagcaaacaagacc

SEQ ID NO: 4411 - DNA, 22 bp, Artificial Sequence
  Primer
caacaatgagaaaaagtggcga

SEQ ID NO: 4412 - DNA, 21 bp, Artificial Sequence
  Primer
tgagaaaaagtggcgagtaga

SEQ ID NO: 4413 - DNA, 22 bp, Artificial Sequence
  Primer
caaatatgcctgctgacaacaa

SEQ ID NO: 4414 - DNA, 22 bp, Artificial Sequence
  Primer
acatacaaactaccaccatcac

SEQ ID NO: 4415 - DNA, 22 bp, Artificial Sequence
  Primer
gcagatgggtaatagagagcaa

SEQ ID NO: 4416 - DNA, 21 bp, Artificial Sequence
  Primer
ctgatagtaatgccagcacaa

SEQ ID NO: 4417 - DNA, 20 bp, Artificial Sequence
  Primer
gctacaccctttgctaactc

SEQ ID NO: 4418 - DNA, 20 bp, Artificial Sequence
  Primer
cacaacggcatcatcagaaa

SEQ ID NO: 4419 - DNA, 19 bp, Artificial Sequence
  Primer
gttaccgcaggactcaaca

SEQ ID NO: 4420 - DNA, 20 bp, Artificial Sequence
  Primer
ccagaaagcaaacaagaccc

SEQ ID NO: 4421 - DNA, 19 bp, Artificial Sequence
  Primer
accatagtcaacgatgccc

SEQ ID NO: 4422 - DNA, 20 bp, Artificial Sequence
  Primer
gtccttccactctaccatca

SEQ ID NO: 4423 - DNA, 22 bp, Artificial Sequence
  Primer
tggcatctacaatacagacaac

SEQ ID NO: 4424 - DNA, 18 bp, Artificial Sequence
  Primer
tgaagcaccaccaaagga

SEQ ID NO: 4425 - DNA, 21 bp, Artificial Sequence
  Primer
ctgatagtaatgccagcacaa

SEQ ID NO: 4426 - DNA, 21 bp, Artificial Sequence
  Primer
gtccttccactctaccatcaa

SEQ ID NO: 4427 - DNA, 18 bp, Artificial Sequence
  Primer
acgcatagcatcgcagaa

SEQ ID NO: 4428 - DNA, 25 bp, Artificial Sequence
  Primer
gagcaagcatttctctcaaattcca

SEQ ID NO: 4429 - DNA, 19 bp, Artificial Sequence
  Primer
aggcagcacaagtcaccaa

SEQ ID NO: 4430 - DNA, 20 bp, Artificial Sequence
  Primer
gtttcgcctcaatccattca

SEQ ID NO: 4431 - DNA, 22 bp, Artificial Sequence
  Primer
ctgatagtaatgccagcacaaa

SEQ ID NO: 4432 - DNA, 20 bp, Artificial Sequence
  Primer
gcaccaaatatgcctgctga

SEQ ID NO: 4433 - DNA, 21 bp, Artificial Sequence
  Primer
ctacagccataacctttccac

SEQ ID NO: 4434 - DNA, 21 bp, Artificial Sequence
  Primer
aagcagacacatctaaagcac

SEQ ID NO: 4435 - DNA, 20 bp, Artificial Sequence
  Primer
gcagacacatctaaagcacc

SEQ ID NO: 4436 - DNA, 20 bp, Artificial Sequence
  Primer
cagacacatctaaagcaccc

SEQ ID NO: 4437 - DNA, 20 bp, Artificial Sequence
  Primer
ccaaatatgcctgctgacaa

SEQ ID NO: 4438 - DNA, 19 bp, Artificial Sequence
  Primer
ctttccacattccgcagac

SEQ ID NO: 4439 - DNA, 18 bp, Artificial Sequence
  Primer
tgaagcaccaccaaagga

SEQ ID NO: 4440 - DNA, 19 bp, Artificial Sequence
  Primer
ccacaataggaactccgca

SEQ ID NO: 4441 - DNA, 21 bp, Artificial Sequence
  Primer
ctaacagaaccctccaggtaa

SEQ ID NO: 4442 - DNA, 22 bp, Artificial Sequence
  Primer
caaatatgcctgctgacaacaa

SEQ ID NO: 4443 - DNA, 20 bp, Artificial Sequence
  Primer
ccaacataggcaaacacaca

SEQ ID NO: 4444 - DNA, 21 bp, Artificial Sequence
  Primer
gaagcagagaaagatgccaaa

SEQ ID NO: 4445 - DNA, 20 bp, Artificial Sequence
  Primer
agcagaaaggctaaaaagca

SEQ ID NO: 4446 - DNA, 21 bp, Artificial Sequence
  Primer
gcagaaaggctaaaaagcaca

SEQ ID NO: 4447 - DNA, 20 bp, Artificial Sequence
  Primer
gcatcgtcctcttcttcctc

SEQ ID NO: 4448 - DNA, 20 bp, Artificial Sequence
  Primer
gaagcagagaaagatgccaa

SEQ ID NO: 4449 - DNA, 19 bp, Artificial Sequence
  Primer
gccagtaaaccaggagaca

SEQ ID NO: 4450 - DNA, 24 bp, Artificial Sequence
  Primer
gcagcctcttcaagattaaaacca

SEQ ID NO: 4451 - DNA, 19 bp, Artificial Sequence
  Primer
cacaacggcatcatcagaa

SEQ ID NO: 4452 - DNA, 21 bp, Artificial Sequence
  Primer
tgaaggtgagccaagaatgaa

SEQ ID NO: 4453 - DNA, 25 bp, Artificial Sequence
  Primer
ccatcaaacaagacagtaagtgaag

SEQ ID NO: 4454 - DNA, 19 bp, Artificial Sequence
  Primer
caagttaggcatcgcaaca

SEQ ID NO: 4455 - DNA, 20 bp, Artificial Sequence
  Primer
acaagttaggcatcgcaaca

SEQ ID NO: 4456 - DNA, 20 bp, Artificial Sequence
  Primer
gcgagcagatgggtaataga

SEQ ID NO: 4457 - DNA, 21 bp, Artificial Sequence
  Primer
cgagcagatgggtaatagaga

SEQ ID NO: 4458 - DNA, 22 bp, Artificial Sequence
  Primer
gcagatgggtaatagagagcaa

SEQ ID NO: 4459 - DNA, 21 bp, Artificial Sequence
  Primer
tgttgaacctcctcttgtctg

SEQ ID NO: 4460 - DNA, 20 bp, Artificial Sequence
  Primer
gcgagcagatgggtaataga

SEQ ID NO: 4461 - DNA, 21 bp, Artificial Sequence
  Primer
tccaagaacacactcagacat

SEQ ID NO: 4462 - DNA, 19 bp, Artificial Sequence
  Primer
cagcaccaaatgtccatcc

SEQ ID NO: 4463 - DNA, 21 bp, Artificial Sequence
  Primer
cgagcagatgggtaatagaga

SEQ ID NO: 4464 - DNA, 22 bp, Artificial Sequence
  Primer
gcagatgggtaatagagagcaa

SEQ ID NO: 4465 - DNA, 19 bp, Artificial Sequence
  Primer
cagcaccaaatgtccatcc

SEQ ID NO: 4466 - DNA, 19 bp, Artificial Sequence
  Primer
agagcaagtccgatggcaa

SEQ ID NO: 4467 - DNA, 20 bp, Artificial Sequence
  Primer
cgtgatgaggagcgagaaga

SEQ ID NO: 4468 - DNA, 19 bp, Artificial Sequence
  Primer
gtgatgaggagcgagaaga

SEQ ID NO: 4469 - DNA, 20 bp, Artificial Sequence
  Primer
tccaagaacacactcagaca

SEQ ID NO: 4470 - DNA, 25 bp, Artificial Sequence
  Primer
tgccaataacgacatcacaatttcc

SEQ ID NO: 4471 - DNA, 18 bp, Artificial Sequence
  Primer
accctttgctaactcgct

SEQ ID NO: 4472 - DNA, 25 bp, Artificial Sequence
  Primer
gccaataacgacatcacaatttcct

SEQ ID NO: 4473 - DNA, 20 bp, Artificial Sequence
  Primer
gccctctacatcaaagccaa

SEQ ID NO: 4474 - DNA, 18 bp, Artificial Sequence
  Primer
aatgcctgaaatgtcgcc

SEQ ID NO: 4475 - DNA, 18 bp, Artificial Sequence
  Primer
agcaagtccgatggcaaa

SEQ ID NO: 4476 - DNA, 18 bp, Artificial Sequence
  Primer
tgcctgaaatgtcgccaa

SEQ ID NO: 4477 - DNA, 18 bp, Artificial Sequence
  Primer
aatgcctgaaatgtcgcc

SEQ ID NO: 4478 - DNA, 18 bp, Artificial Sequence
  Primer
gcaagtccgatggcaaaa

SEQ ID NO: 4479 - DNA, 18 bp, Artificial Sequence
  Primer
tgcctgaaatgtcgccaa

SEQ ID NO: 4480 - DNA, 22 bp, Artificial Sequence
  Primer
ttcctcttcttcttcctcaact

SEQ ID NO: 4481 - DNA, 20 bp, Artificial Sequence
  Primer
gataacagcagcatacagcc

SEQ ID NO: 4482 - DNA, 20 bp, Artificial Sequence
  Primer
caaacacacagcctccaaaa

SEQ ID NO: 4483 - DNA, 21 bp, Artificial Sequence
  Primer
gtcaacaatttcagcaggaca

SEQ ID NO: 4484 - DNA, 24 bp, Artificial Sequence
  Primer
ctgtgtaataaaccaagaagtgcc

SEQ ID NO: 4485 - DNA, 19 bp, Artificial Sequence
  Primer
agcaatgaagccgagccaa

SEQ ID NO: 4486 - DNA, 19 bp, Artificial Sequence
  Primer
gcaatgaagccgagccaaa

SEQ ID NO: 4487 - DNA, 21 bp, Artificial Sequence
  Primer
cgagcagatgggtaatagaga

SEQ ID NO: 4488 - DNA, 19 bp, Artificial Sequence
  Primer
agcaatgaagccgagccaa

SEQ ID NO: 4489 - DNA, 19 bp, Artificial Sequence
  Primer
tgatgaggagcgagaagag

SEQ ID NO: 4490 - DNA, 20 bp, Artificial Sequence
  Primer
gcgagcagatgggtaataga

SEQ ID NO: 4491 - DNA, 19 bp, Artificial Sequence
  Primer
gcaatgaagccgagccaaa

SEQ ID NO: 4492 - DNA, 20 bp, Artificial Sequence
  Primer
atgacagccctctacatcaa

SEQ ID NO: 4493 - DNA, 20 bp, Artificial Sequence
  Primer
tgacagccctctacatcaaa

SEQ ID NO: 4494 - DNA, 19 bp, Artificial Sequence
  Primer
caaacacacagcctccaaa

SEQ ID NO: 4495 - DNA, 20 bp, Artificial Sequence
  Primer
atgacagccctctacatcaa

SEQ ID NO: 4496 - DNA, 20 bp, Artificial Sequence
  Primer
tgacagccctctacatcaaa

SEQ ID NO: 4497 - DNA, 20 bp, Artificial Sequence
  Primer
aactgtcacctgtcacttct

SEQ ID NO: 4498 - DNA, 22 bp, Artificial Sequence
  Primer
ctgatagtaatgccagcacaaa

SEQ ID NO: 4499 - DNA, 21 bp, Artificial Sequence
  Primer
ctacagccataacctttccac

SEQ ID NO: 4500 - DNA, 22 bp, Artificial Sequence
  Primer
cttcccaaacagtatcttctcc

SEQ ID NO: 4501 - DNA, 22 bp, Artificial Sequence
  Primer
gccattttcctaaaaccactct

SEQ ID NO: 4502 - DNA, 18 bp, Artificial Sequence
  Primer
tgccagcctgaacaagaa

SEQ ID NO: 4503 - DNA, 22 bp, Artificial Sequence
  Primer
gttttcttcaccagcatcatca

SEQ ID NO: 4504 - DNA, 19 bp, Artificial Sequence
  Primer
caccatagtcaacgatgcc

SEQ ID NO: 4505 - DNA, 21 bp, Artificial Sequence
  Primer
tcaagcctacaatacaagcca

SEQ ID NO: 4506 - DNA, 20 bp, Artificial Sequence
  Primer
tcgtcctcttcttcctcatc

SEQ ID NO: 4507 - DNA, 20 bp, Artificial Sequence
  Primer
ctgaaggacaggcaaactga

SEQ ID NO: 4508 - DNA, 20 bp, Artificial Sequence
  Primer
gcatcgtcctcttcttcctc

SEQ ID NO: 4509 - DNA, 19 bp, Artificial Sequence
  Primer
tgaagcaccaccaaaggac

SEQ ID NO: 4510 - DNA, 19 bp, Artificial Sequence
  Primer
tgccagcctgaacaagaaa

SEQ ID NO: 4511 - DNA, 19 bp, Artificial Sequence
  Primer
accatagtcaacgatgccc

SEQ ID NO: 4512 - DNA, 18 bp, Artificial Sequence
  Primer
acgcatagcatcgcagaa

SEQ ID NO: 4513 - DNA, 21 bp, Artificial Sequence
  Primer
agaatcggacaccatagtcaa

SEQ ID NO: 4514 - DNA, 21 bp, Artificial Sequence
  Primer
gccataacctttccacattcc

SEQ ID NO: 4515 - DNA, 20 bp, Artificial Sequence
  Primer
tcaacaccacagaaaactcc

SEQ ID NO: 4516 - DNA, 20 bp, Artificial Sequence
  Primer
acacatctaaagcacccaca

SEQ ID NO: 4517 - DNA, 23 bp, Artificial Sequence
  Primer
gcatcaccatagtcacctttttc

SEQ ID NO: 4518 - DNA, 18 bp, Artificial Sequence
  Primer
tgccagcctgaacaagaa

SEQ ID NO: 4519 - DNA, 20 bp, Artificial Sequence
  Primer
ggcaataataccaccagcca

SEQ ID NO: 4520 - DNA, 19 bp, Artificial Sequence
  Primer
cgcatcaacaccacagaaa

SEQ ID NO: 4521 - DNA, 23 bp, Artificial Sequence
  Primer
gcatcaccatagtcacctttttc

SEQ ID NO: 4522 - DNA, 20 bp, Artificial Sequence
  Primer
cgcatcaacaccacagaaaa

SEQ ID NO: 4523 - DNA, 19 bp, Artificial Sequence
  Primer
tgccagcctgaacaagaaa

SEQ ID NO: 4524 - DNA, 21 bp, Artificial Sequence
  Primer
gcaagaataccacgaaagcaa

SEQ ID NO: 4525 - DNA, 18 bp, Artificial Sequence
  Primer
tgaagcaccaccaaagga

SEQ ID NO: 4526 - DNA, 20 bp, Artificial Sequence
  Primer
gcaagaataccacgaaagca

SEQ ID NO: 4527 - DNA, 21 bp, Artificial Sequence
  Primer
gcaagaataccacgaaagcaa

SEQ ID NO: 4528 - DNA, 20 bp, Artificial Sequence
  Primer
acaccatagtcaacgatgcc

SEQ ID NO: 4529 - DNA, 19 bp, Artificial Sequence
  Primer
acacacagcctccaaaaca

SEQ ID NO: 4530 - DNA, 19 bp, Artificial Sequence
  Primer
accatagtcaacgatgccc

SEQ ID NO: 4531 - DNA, 19 bp, Artificial Sequence
  Primer
aagcacagaaggaaagcac

SEQ ID NO: 4532 - DNA, 19 bp, Artificial Sequence
  Primer
aaccagcacatccttgtcc

SEQ ID NO: 4533 - DNA, 19 bp, Artificial Sequence
  Primer
caccatagtcaacgatgcc

SEQ ID NO: 4534 - DNA, 19 bp, Artificial Sequence
  Primer
accatagtcaacgatgccc

SEQ ID NO: 4535 - DNA, 20 bp, Artificial Sequence
  Primer
acagccataacctttccaca

SEQ ID NO: 4536 - DNA, 20 bp, Artificial Sequence
  Primer
aacactatgctcaggtccaa

SEQ ID NO: 4537 - DNA, 23 bp, Artificial Sequence
  Primer
agcagatgggtaatagagagcaa

SEQ ID NO: 4538 - DNA, 20 bp, Artificial Sequence
  Primer
caaacacacagcctccaaaa

SEQ ID NO: 4539 - DNA, 22 bp, Artificial Sequence
  Primer
gcagatgggtaatagagagcaa

SEQ ID NO: 4540 - DNA, 19 bp, Artificial Sequence
  Primer
caaacacacagcctccaaa

SEQ ID NO: 4541 - DNA, 19 bp, Artificial Sequence
  Primer
gcaaacacacagcctccaa

SEQ ID NO: 4542 - DNA, 22 bp, Artificial Sequence
  Primer
gaagcagagaaagatgccaaaa

SEQ ID NO: 4543 - DNA, 21 bp, Artificial Sequence
  Primer
gaagcagagaaagatgccaaa

SEQ ID NO: 4544 - DNA, 22 bp, Artificial Sequence
  Primer
cttttcacatagggcatcaaca

SEQ ID NO: 4545 - DNA, 20 bp, Artificial Sequence
  Primer
gaagcagagaaagatgccaa

SEQ ID NO: 4546 - DNA, 20 bp, Artificial Sequence
  Primer
aacactatgctcaggtccaa

SEQ ID NO: 4547 - DNA, 19 bp, Artificial Sequence
  Primer
caccatagtcaacgatgcc

SEQ ID NO: 4548 - DNA, 19 bp, Artificial Sequence
  Primer
agcacagaaggaaagcaca

SEQ ID NO: 4549 - DNA, 21 bp, Artificial Sequence
  Primer
ctgatagtaatgccagcacaa

SEQ ID NO: 4550 - DNA, 19 bp, Artificial Sequence
  Primer
atgtcagccgcaggaagaa

SEQ ID NO: 4551 - DNA, 20 bp, Artificial Sequence
  Primer
aaaagcacagaaggaaagca

SEQ ID NO: 4552 - DNA, 20 bp, Artificial Sequence
  Primer
tccagaaagcaaacaagacc

SEQ ID NO: 4553 - DNA, 20 bp, Artificial Sequence
  Primer
ccagaaagcaaacaagaccc

SEQ ID NO: 4554 - DNA, 22 bp, Artificial Sequence
  Primer
gccacaaggttaaagtcattca

SEQ ID NO: 4555 - DNA, 19 bp, Artificial Sequence
  Primer
accatagtcaacgatgccc

SEQ ID NO: 4556 - DNA, 22 bp, Artificial Sequence
  Primer
aaacaagaccctcctactgtaa

SEQ ID NO: 4557 - DNA, 19 bp, Artificial Sequence
  Primer
tactgacactacggcagga

SEQ ID NO: 4558 - DNA, 18 bp, Artificial Sequence
  Primer
tgcctgaaatgtcgccaa

SEQ ID NO: 4559 - DNA, 18 bp, Artificial Sequence
  Primer
aatgcctgaaatgtcgcc

SEQ ID NO: 4560 - DNA, 19 bp, Artificial Sequence
  Primer
agcaagaaccacaagagca

SEQ ID NO: 4561 - DNA, 18 bp, Artificial Sequence
  Primer
tgcctgaaatgtcgccaa

SEQ ID NO: 4562 - DNA, 18 bp, Artificial Sequence
  Primer
aatgcctgaaatgtcgcc

SEQ ID NO: 4563 - DNA, 22 bp, Artificial Sequence
  Primer
gaagcagagaaagatgccaaaa

SEQ ID NO: 4564 - DNA, 24 bp, Artificial Sequence
  Primer
gccaataacgacatcacaatttcc

SEQ ID NO: 4565 - DNA, 21 bp, Artificial Sequence
  Primer
actacagccataacctttcca

SEQ ID NO: 4566 - DNA, 25 bp, Artificial Sequence
  Primer
gccaataacgacatcacaatttcct

SEQ ID NO: 4567 - DNA, 18 bp, Artificial Sequence
  Primer
tcaaagccaatccacgca

SEQ ID NO: 4568 - DNA, 24 bp, Artificial Sequence
  Primer
gccaataacgacatcacaatttcc

SEQ ID NO: 4569 - DNA, 22 bp, Artificial Sequence
  Primer
cctctacatcaaagccaatcca

SEQ ID NO: 4570 - DNA, 20 bp, Artificial Sequence
  Primer
cgcaggaagaagagtcacag

SEQ ID NO: 4571 - DNA, 24 bp, Artificial Sequence
  Primer
cactcagacattttagtagcagca

SEQ ID NO: 4572 - DNA, 19 bp, Artificial Sequence
  Primer
ccacaataggaactccgca

SEQ ID NO: 4573 - DNA, 20 bp, Artificial Sequence
  Primer
atcagcagaagctccactca

SEQ ID NO: 4574 - DNA, 20 bp, Artificial Sequence
  Primer
gccctctacatcaaagccaa

SEQ ID NO: 4575 - DNA, 19 bp, Artificial Sequence
  Primer
gccgagccaaacataccaa

SEQ ID NO: 4576 - DNA, 20 bp, Artificial Sequence
  Primer
cgcaggaagaagagtcacag

SEQ ID NO: 4577 - DNA, 19 bp, Artificial Sequence
  Primer
accatagtcaacgatgccc

SEQ ID NO: 4578 - DNA, 20 bp, Artificial Sequence
  Primer
atcagcagaagctccactca

SEQ ID NO: 4579 - DNA, 20 bp, Artificial Sequence
  Primer
cgcaggaagaagagtcacag

SEQ ID NO: 4580 - DNA, 19 bp, Artificial Sequence
  Primer
gccgagccaaacataccaa

SEQ ID NO: 4581 - DNA, 20 bp, Artificial Sequence
  Primer
atcagcagaagctccactca

SEQ ID NO: 4582 - DNA, 18 bp, Artificial Sequence
  Primer
taccgtcagcacaagcaa

SEQ ID NO: 4583 - DNA, 21 bp, Artificial Sequence
  Primer
actgtcacctgtcacttctaa

SEQ ID NO: 4584 - DNA, 20 bp, Artificial Sequence
  Primer
gagcaagtccgatggcaaaa

SEQ ID NO: 4585 - DNA, 20 bp, Artificial Sequence
  Primer
gaaagcaaacaagaccctcc

SEQ ID NO: 4586 - DNA, 20 bp, Artificial Sequence
  Primer
agagcaagtccgatggcaaa

SEQ ID NO: 4587 - DNA, 19 bp, Artificial Sequence
  Primer
caagttaggcatcgcaaca

SEQ ID NO: 4588 - DNA, 19 bp, Artificial Sequence
  Primer
caagttaggcatcgcaaca

SEQ ID NO: 4589 - DNA, 21 bp, Artificial Sequence
  Primer
ctacagccataacctttccac

SEQ ID NO: 4590 - DNA, 19 bp, Artificial Sequence
  Primer
agagcaagtccgatggcaa

SEQ ID NO: 4591 - DNA, 19 bp, Artificial Sequence
  Primer
tatgggactcagcagccaa

SEQ ID NO: 4592 - DNA, 21 bp, Artificial Sequence
  Primer
gccataacctttccacattcc

SEQ ID NO: 4593 - DNA, 22 bp, Artificial Sequence
  Primer
caacagcatcaccatagtcacc

SEQ ID NO: 4594 - DNA, 20 bp, Artificial Sequence
  Primer
gaaagcaaacaagaccctcc

SEQ ID NO: 4595 - DNA, 20 bp, Artificial Sequence
  Primer
ccagaaagcaaacaagaccc

SEQ ID NO: 4596 - DNA, 21 bp, Artificial Sequence
  Primer
acaacagcatcaccatagtca

SEQ ID NO: 4597 - DNA, 21 bp, Artificial Sequence
  Primer
aactgtcacctgtcacttcta

SEQ ID NO: 4598 - DNA, 25 bp, Artificial Sequence
  Primer
ccaaaaaggcacaataggagaaaac

SEQ ID NO: 4599 - DNA, 19 bp, Artificial Sequence
  Primer
gccagtaaaccaggagaca

SEQ ID NO: 4600 - DNA, 18 bp, Artificial Sequence
  Primer
aacagcagcatacagcca

SEQ ID NO: 4601 - DNA, 19 bp, Artificial Sequence
  Primer
tcatcgcatcaacaccaca

SEQ ID NO: 4602 - DNA, 20 bp, Artificial Sequence
  Primer
tccagaaagcaaacaagacc

SEQ ID NO: 4603 - DNA, 19 bp, Artificial Sequence
  Primer
tgaaggacaggcaaactga

SEQ ID NO: 4604 - DNA, 19 bp, Artificial Sequence
  Primer
gctatccgcatcaacaact

SEQ ID NO: 4605 - DNA, 22 bp, Artificial Sequence
  Primer
catatagcagaaagacacgcaa

SEQ ID NO: 4606 - DNA, 20 bp, Artificial Sequence
  Primer
agcaaacaagaccctcctac

SEQ ID NO: 4607 - DNA, 21 bp, Artificial Sequence
  Primer
catatagcagaaagacacgca

SEQ ID NO: 4608 - DNA, 20 bp, Artificial Sequence
  Primer
gataacagcagcatacagcc

SEQ ID NO: 4609 - DNA, 21 bp, Artificial Sequence
  Primer
catatagcagaaagacacgca

SEQ ID NO: 4610 - DNA, 20 bp, Artificial Sequence
  Primer
gaaagcaaacaagaccctcc

SEQ ID NO: 4611 - DNA, 20 bp, Artificial Sequence
  Primer
agcaaacaagaccctcctac

SEQ ID NO: 4612 - DNA, 20 bp, Artificial Sequence
  Primer
gaaagcaaacaagaccctcc

SEQ ID NO: 4613 - DNA, 20 bp, Artificial Sequence
  Primer
ccagaaagcaaacaagaccc

SEQ ID NO: 4614 - DNA, 20 bp, Artificial Sequence
  Primer
gccagtaaaccaggagacaa

SEQ ID NO: 4615 - DNA, 22 bp, Artificial Sequence
  Primer
gcagaaagacacgcaatcataa

SEQ ID NO: 4616 - DNA, 19 bp, Artificial Sequence
  Primer
ctttccacattccgcagac

SEQ ID NO: 4617 - DNA, 21 bp, Artificial Sequence
  Primer
cacaatacacaagcacctaca

SEQ ID NO: 4618 - DNA, 20 bp, Artificial Sequence
  Primer
tgccttcctcatccttctcc

SEQ ID NO: 4619 - DNA, 19 bp, Artificial Sequence
  Primer
gcatttcctcgcacaacct

SEQ ID NO: 4620 - DNA, 19 bp, Artificial Sequence
  Primer
gcatcgtcctcttcttcct

SEQ ID NO: 4621 - DNA, 21 bp, Artificial Sequence
  Primer
agttacttttgccctcttgtc

SEQ ID NO: 4622 - DNA, 20 bp, Artificial Sequence
  Primer
tcaacaccacagaaaactcc

SEQ ID NO: 4623 - DNA, 19 bp, Artificial Sequence
  Primer
ccgtcagcacaagcaaaag

SEQ ID NO: 4624 - DNA, 22 bp, Artificial Sequence
  Primer
caataataccaccagccactac

SEQ ID NO: 4625 - DNA, 20 bp, Artificial Sequence
  Primer
caacagtagtgcccaaaaga

SEQ ID NO: 4626 - DNA, 22 bp, Artificial Sequence
  Primer
actactctaacagaaccctcca

SEQ ID NO: 4627 - DNA, 22 bp, Artificial Sequence
  Primer
ctgttgaataatgccgtctact

SEQ ID NO: 4628 - DNA, 24 bp, Artificial Sequence
  Primer
tagtacagtcgtacctctaacaca

SEQ ID NO: 4629 - DNA, 22 bp, Artificial Sequence
  Primer
cttccactctaccatcaaacaa

SEQ ID NO: 4630 - DNA, 20 bp, Artificial Sequence
  Primer
gcaccaaatatgcctgctga

SEQ ID NO: 4631 - DNA, 20 bp, Artificial Sequence
  Primer
ccaaatatgcctgctgacaa

SEQ ID NO: 4632 - DNA, 21 bp, Artificial Sequence
  Primer
tccttccactctaccatcaaa

SEQ ID NO: 4633 - DNA, 19 bp, Artificial Sequence
  Primer
aagcacagaaggaaagcac

SEQ ID NO: 4634 - DNA, 19 bp, Artificial Sequence
  Primer
accgtcagcacaagcaaaa

SEQ ID NO: 4635 - DNA, 22 bp, Artificial Sequence
  Primer
tccttccactctaccatcaaac

SEQ ID NO: 4636 - DNA, 22 bp, Artificial Sequence
  Primer
tccttccactctaccatcaaac

SEQ ID NO: 4637 - DNA, 20 bp, Artificial Sequence
  Primer
ccagaaagcaaacaagaccc

SEQ ID NO: 4638 - DNA, 19 bp, Artificial Sequence
  Primer
aggcagcacaagtcaccaa

SEQ ID NO: 4639 - DNA, 21 bp, Artificial Sequence
  Primer
gataacaccagcagcctgtga

SEQ ID NO: 4640 - DNA, 19 bp, Artificial Sequence
  Primer
taccgtcagcacaagcaaa

SEQ ID NO: 4641 - DNA, 18 bp, Artificial Sequence
  Primer
taccgtcagcacaagcaa

SEQ ID NO: 4642 - DNA, 21 bp, Artificial Sequence
  Primer
tgtaacatcagcaccatccaa

SEQ ID NO: 4643 - DNA, 20 bp, Artificial Sequence
  Primer
tctacctgtccttccactct

SEQ ID NO: 4644 - DNA, 18 bp, Artificial Sequence
  Primer
cagcagcaagcacaaaac

SEQ ID NO: 4645 - DNA, 23 bp, Artificial Sequence
  Primer
cacatacaaactaccaccatcac

SEQ ID NO: 4646 - DNA, 24 bp, Artificial Sequence
  Primer
ggctaaatccagcagaaatcatca

SEQ ID NO: 4647 - DNA, 19 bp, Artificial Sequence
  Primer
aagagccagccaaagaaac

SEQ ID NO: 4648 - DNA, 20 bp, Artificial Sequence
  Primer
ccagaaagcaaacaagaccc

SEQ ID NO: 4649 - DNA, 21 bp, Artificial Sequence
  Primer
gccacatcaagcctacaatac

SEQ ID NO: 4650 - DNA, 20 bp, Artificial Sequence
  Primer
tccagaaagcaaacaagacc

SEQ ID NO: 4651 - DNA, 20 bp, Artificial Sequence
  Primer
ctaagccacatcaagcctac

SEQ ID NO: 4652 - DNA, 19 bp, Artificial Sequence
  Primer
gcctgaaggaagcaacgaa

SEQ ID NO: 4653 - DNA, 18 bp, Artificial Sequence
  Primer
acagcctgaaggaagcaa

SEQ ID NO: 4654 - DNA, 19 bp, Artificial Sequence
  Primer
agcaaacagcctgaaggaa

SEQ ID NO: 4655 - DNA, 21 bp, Artificial Sequence
  Primer
ggctaaatccagcagaaatca

SEQ ID NO: 4656 - DNA, 20 bp, Artificial Sequence
  Primer
tccataggctaaatccagca

SEQ ID NO: 4657 - DNA, 18 bp, Artificial Sequence
  Primer
agcagccaacataggcaa

SEQ ID NO: 4658 - DNA, 18 bp, Artificial Sequence
  Primer
gcagccaacataggcaaa

SEQ ID NO: 4659 - DNA, 19 bp, Artificial Sequence
  Primer
ctttccacattccgcagac

SEQ ID NO: 4660 - DNA, 24 bp, Artificial Sequence
  Primer
ggctaaatccagcagaaatcatca

SEQ ID NO: 4661 - DNA, 21 bp, Artificial Sequence
  Primer
ggctaaatccagcagaaatca

SEQ ID NO: 4662 - DNA, 20 bp, Artificial Sequence
  Primer
ccagaaagcaaacaagaccc

SEQ ID NO: 4663 - DNA, 22 bp, Artificial Sequence
  Primer
caaatatgcctgctgacaacaa

SEQ ID NO: 4664 - DNA, 20 bp, Artificial Sequence
  Primer
tgaaggtgagccaagaatga

SEQ ID NO: 4665 - DNA, 25 bp, Artificial Sequence
  Primer
cccactgctgaacatcaatcataaa

SEQ ID NO: 4666 - DNA, 24 bp, Artificial Sequence
  Primer
cccactgctgaacatcaatcataa

SEQ ID NO: 4667 - DNA, 19 bp, Artificial Sequence
  Primer
ccccactgctgaacatcaa

SEQ ID NO: 4668 - DNA, 21 bp, Artificial Sequence
  Primer
tgaaggtgagccaagaatgaa

SEQ ID NO: 4669 - DNA, 18 bp, Artificial Sequence
  Primer
catcgcatcaacaccaca

SEQ ID NO: 4670 - DNA, 21 bp, Artificial Sequence
  Primer
gaaggtgagccaagaatgaaa

SEQ ID NO: 4671 - DNA, 22 bp, Artificial Sequence
  Primer
cttgctatccgcatcaacaact

SEQ ID NO: 4672 - DNA, 20 bp, Artificial Sequence
  Primer
gcaccaaatatgcctgctga

SEQ ID NO: 4673 - DNA, 21 bp, Artificial Sequence
  Primer
accaaatatgcctgctgacaa

SEQ ID NO: 4674 - DNA, 21 bp, Artificial Sequence
  Primer
agcaagaataccacgaaagca

SEQ ID NO: 4675 - DNA, 20 bp, Artificial Sequence
  Primer
ccagaaagcaaacaagaccc

SEQ ID NO: 4676 - DNA, 20 bp, Artificial Sequence
  Primer
tccagaaagcaaacaagacc

SEQ ID NO: 4677 - DNA, 22 bp, Artificial Sequence
  Primer
caaatatgcctgctgacaacaa

SEQ ID NO: 4678 - DNA, 20 bp, Artificial Sequence
  Primer
ccaaatatgcctgctgacaa

SEQ ID NO: 4679 - DNA, 22 bp, Artificial Sequence
  Primer
caaatatgcctgctgacaacaa

SEQ ID NO: 4680 - DNA, 19 bp, Artificial Sequence
  Primer
cgcatcaacaccacagaaa

SEQ ID NO: 4681 - DNA, 20 bp, Artificial Sequence
  Primer
gcaccaaatatgcctgctga

SEQ ID NO: 4682 - DNA, 25 bp, Artificial Sequence
  Primer
cccactgctgaacatcaatcataaa

SEQ ID NO: 4683 - DNA, 24 bp, Artificial Sequence
  Primer
cccactgctgaacatcaatcataa

SEQ ID NO: 4684 - DNA, 20 bp, Artificial Sequence
  Primer
cgcatcaacaccacagaaaa

SEQ ID NO: 4685 - DNA, 20 bp, Artificial Sequence
  Primer
ccagaaagcaaacaagaccc

SEQ ID NO: 4686 - DNA, 20 bp, Artificial Sequence
  Primer
atccgcatcaacaacttgct

SEQ ID NO: 4687 - DNA, 20 bp, Artificial Sequence
  Primer
cagcaagaacgcaagcagag

SEQ ID NO: 4688 - DNA, 20 bp, Artificial Sequence
  Primer
tgacagccctctacatcaaa

SEQ ID NO: 4689 - DNA, 20 bp, Artificial Sequence
  Primer
atgacagccctctacatcaa

SEQ ID NO: 4690 - DNA, 19 bp, Artificial Sequence
  Primer
ccccactgctgaacatcaa

SEQ ID NO: 4691 - DNA, 20 bp, Artificial Sequence
  Primer
aggttacccgtaaagcccca

SEQ ID NO: 4692 - DNA, 20 bp, Artificial Sequence
  Primer
tcaacaccacagaaaactcc

SEQ ID NO: 4693 - DNA, 18 bp, Artificial Sequence
  Primer
agcagccaacataggcaa

SEQ ID NO: 4694 - DNA, 21 bp, Artificial Sequence
  Primer
aatgattccagcaggcataag

SEQ ID NO: 4695 - DNA, 22 bp, Artificial Sequence
  Primer
gacatagtcaaaacccacagaa

SEQ ID NO: 4696 - DNA, 22 bp, Artificial Sequence
  Primer
actactctaacagaaccctcca

SEQ ID NO: 4697 - DNA, 18 bp, Artificial Sequence
  Primer
gcagccaacataggcaaa

SEQ ID NO: 4698 - DNA, 19 bp, Artificial Sequence
  Primer
acaactgtcacctgtcact

SEQ ID NO: 4699 - DNA, 18 bp, Artificial Sequence
  Primer
acctttccacattccgca

SEQ ID NO: 4700 - DNA, 21 bp, Artificial Sequence
  Primer
actgtcacctgtcacttctaa

SEQ ID NO: 4701 - DNA, 21 bp, Artificial Sequence
  Primer
aatgattccagcaggcataag

SEQ ID NO: 4702 - DNA, 22 bp, Artificial Sequence
  Primer
ccacgaaagcaagaaaaagaag

SEQ ID NO: 4703 - DNA, 20 bp, Artificial Sequence
  Primer
tgaaggtgagccaagaatga

SEQ ID NO: 4704 - DNA, 22 bp, Artificial Sequence
  Primer
gcaagaataccacgaaagcaag

SEQ ID NO: 4705 - DNA, 21 bp, Artificial Sequence
  Primer
tgaaggtgagccaagaatgaa

SEQ ID NO: 4706 - DNA, 21 bp, Artificial Sequence
  Primer
aactgtcacctgtcacttcta

SEQ ID NO: 4707 - DNA, 19 bp, Artificial Sequence
  Primer
gccaacataggcaaacaca

SEQ ID NO: 4708 - DNA, 20 bp, Artificial Sequence
  Primer
acagccataacctttccaca

SEQ ID NO: 4709 - DNA, 21 bp, Artificial Sequence
  Primer
gaaggtgagccaagaatgaaa

SEQ ID NO: 4710 - DNA, 20 bp, Artificial Sequence
  Primer
tgctatccgcatcaacaact

SEQ ID NO: 4711 - DNA, 22 bp, Artificial Sequence
  Primer
caaatatgcctgctgacaacaa

SEQ ID NO: 4712 - DNA, 20 bp, Artificial Sequence
  Primer
gtgttgaaatgccgtcacct

SEQ ID NO: 4713 - DNA, 18 bp, Artificial Sequence
  Primer
gcagcgacaagcaaaaga

SEQ ID NO: 4714 - DNA, 20 bp, Artificial Sequence
  Primer
ccaacaaagccaacatctca

SEQ ID NO: 4715 - DNA, 21 bp, Artificial Sequence
  Primer
aatgattccagcaggcataag

SEQ ID NO: 4716 - DNA, 20 bp, Artificial Sequence
  Primer
ccaaatatgcctgctgacaa

SEQ ID NO: 4717 - DNA, 20 bp, Artificial Sequence
  Primer
gcaccaaatatgcctgctga

SEQ ID NO: 4718 - DNA, 19 bp, Artificial Sequence
  Primer
tccgcatcaacaacttgct

SEQ ID NO: 4719 - DNA, 21 bp, Artificial Sequence
  Primer
actacagccataacctttcca

SEQ ID NO: 4720 - DNA, 20 bp, Artificial Sequence
  Primer
aactgtcacctgtcacttct

SEQ ID NO: 4721 - DNA, 20 bp, Artificial Sequence
  Primer
gaagcagagaaagatgccaa

SEQ ID NO: 4722 - DNA, 21 bp, Artificial Sequence
  Primer
ctgatagtaatgccagcacaa

SEQ ID NO: 4723 - DNA, 22 bp, Artificial Sequence
  Primer
ctgatagtaatgccagcacaaa

SEQ ID NO: 4724 - DNA, 21 bp, Artificial Sequence
  Primer
gaagcagagaaagatgccaaa

SEQ ID NO: 4725 - DNA, 20 bp, Artificial Sequence
  Primer
gcaataataccaccagccac

SEQ ID NO: 4726 - DNA, 20 bp, Artificial Sequence
  Primer
gcaccaaatatgcctgctga

SEQ ID NO: 4727 - DNA, 22 bp, Artificial Sequence
  Primer
caataataccaccagccactac

SEQ ID NO: 4728 - DNA, 22 bp, Artificial Sequence
  Primer
gaagcagagaaagatgccaaaa

SEQ ID NO: 4729 - DNA, 22 bp, Artificial Sequence
  Primer
gcagagaaagatgccaaaatga

SEQ ID NO: 4730 - DNA, 19 bp, Artificial Sequence
  Primer
gccaacataggcaaacaca

SEQ ID NO: 4731 - DNA, 22 bp, Artificial Sequence
  Primer
catatagcagaaagacacgcaa

SEQ ID NO: 4732 - DNA, 22 bp, Artificial Sequence
  Primer
caaatatgcctgctgacaacaa

SEQ ID NO: 4733 - DNA, 20 bp, Artificial Sequence
  Primer
ccaaatatgcctgctgacaa

SEQ ID NO: 4734 - DNA, 22 bp, Artificial Sequence
  Primer
cttcctcttcttcttcctcaac

SEQ ID NO: 4735 - DNA, 19 bp, Artificial Sequence
  Primer
agcaagaaccacaagagca

SEQ ID NO: 4736 - DNA, 21 bp, Artificial Sequence
  Primer
gataacaccagcagcctgtga

SEQ ID NO: 4737 - DNA, 20 bp, Artificial Sequence
  Primer
aactgtcacctgtcacttct

SEQ ID NO: 4738 - DNA, 20 bp, Artificial Sequence
  Primer
gcatcaacaccacagaaaac

SEQ ID NO: 4739 - DNA, 20 bp, Artificial Sequence
  Primer
agacacatctaaagcaccca

SEQ ID NO: 4740 - DNA, 20 bp, Artificial Sequence
  Primer
aagccaatccacgcacgaac

SEQ ID NO: 4741 - DNA, 21 bp, Artificial Sequence
  Primer
gcagcaagaaccacaagagca

SEQ ID NO: 4742 - DNA, 22 bp, Artificial Sequence
  Primer
caactacagccataacctttcc

SEQ ID NO: 4743 - DNA, 19 bp, Artificial Sequence
  Primer
ttcatcgcatcaacaccac

SEQ ID NO: 4744 - DNA, 24 bp, Artificial Sequence
  Primer
cgccaataacaagccatccgaaag

SEQ ID NO: 4745 - DNA, 20 bp, Artificial Sequence
  Primer
gattcatcgcatcaacacca

SEQ ID NO: 4746 - DNA, 20 bp, Artificial Sequence
  Primer
agcaaacaagaccctcctac

SEQ ID NO: 4747 - DNA, 19 bp, Artificial Sequence
  Primer
tgtaagagccagccaaaga

SEQ ID NO: 4748 - DNA, 19 bp, Artificial Sequence
  Primer
caagttaggcatcgcaaca

SEQ ID NO: 4749 - DNA, 20 bp, Artificial Sequence
  Primer
agcaaacaagaccctcctac

SEQ ID NO: 4750 - DNA, 20 bp, Artificial Sequence
  Primer
tccagaaagcaaacaagacc

SEQ ID NO: 4751 - DNA, 20 bp, Artificial Sequence
  Primer
ccagaaagcaaacaagaccc

SEQ ID NO: 4752 - DNA, 20 bp, Artificial Sequence
  Primer
tccagaaagcaaacaagacc

SEQ ID NO: 4753 - DNA, 20 bp, Artificial Sequence
  Primer
tgtaagagccagccaaagaa

SEQ ID NO: 4754 - DNA, 20 bp, Artificial Sequence
  Primer
gtaagagccagccaaagaaa

SEQ ID NO: 4755 - DNA, 22 bp, Artificial Sequence
  Primer
ttcctcttcttcttcctcaact

SEQ ID NO: 4756 - DNA, 20 bp, Artificial Sequence
  Primer
agccgcaggaagaagagtca

SEQ ID NO: 4757 - DNA, 20 bp, Artificial Sequence
  Primer
atgtcagccgcaggaagaag

SEQ ID NO: 4758 - DNA, 20 bp, Artificial Sequence
  Primer
cgcaggaagaagagtcacag

SEQ ID NO: 4759 - DNA, 19 bp, Artificial Sequence
  Primer
acaacggcgacaagttcca

SEQ ID NO: 4760 - DNA, 20 bp, Artificial Sequence
  Primer
cgcaggaagaagagtcacag

SEQ ID NO: 4761 - DNA, 22 bp, Artificial Sequence
  Primer
cttttcacatagggcatcaaca

SEQ ID NO: 4762 - DNA, 18 bp, Artificial Sequence
  Primer
atcacgcatagcatcgca

SEQ ID NO: 4763 - DNA, 19 bp, Artificial Sequence
  Primer
catcgcatcaacaccacag

SEQ ID NO: 4764 - DNA, 19 bp, Artificial Sequence
  Primer
aagccgagccaaacatacc

SEQ ID NO: 4765 - DNA, 20 bp, Artificial Sequence
  Primer
aactgtcacctgtcacttct

SEQ ID NO: 4766 - DNA, 20 bp, Artificial Sequence
  Primer
catcgtcctcttcttcctca

SEQ ID NO: 4767 - DNA, 20 bp, Artificial Sequence
  Primer
catcgtcctcttcttcctca

SEQ ID NO: 4768 - DNA, 20 bp, Artificial Sequence
  Primer
cgcaggaagaagagtcacag

SEQ ID NO: 4769 - DNA, 19 bp, Artificial Sequence
  Primer
aagccgagccaaacatacc

SEQ ID NO: 4770 - DNA, 19 bp, Artificial Sequence
  Primer
gcacagaaggaaagcacag

SEQ ID NO: 4771 - DNA, 20 bp, Artificial Sequence
  Primer
cgcaggaagaagagtcacag

SEQ ID NO: 4772 - DNA, 22 bp, Artificial Sequence
  Primer
tgataacaccagcagcctgtga

SEQ ID NO: 4773 - DNA, 19 bp, Artificial Sequence
  Primer
gctatccgcatcaacaact

SEQ ID NO: 4774 - DNA, 19 bp, Artificial Sequence
  Primer
acaactgtcacctgtcact

SEQ ID NO: 4775 - DNA, 20 bp, Artificial Sequence
  Primer
ctatgcgagcagatgggtaa

SEQ ID NO: 4776 - DNA, 22 bp, Artificial Sequence
  Primer
gcccaaaagattagacaaccac

SEQ ID NO: 4777 - DNA, 20 bp, Artificial Sequence
  Primer
atcagcagaagctccactca

SEQ ID NO: 4778 - DNA, 20 bp, Artificial Sequence
  Primer
agccgagccaaacataccaa

SEQ ID NO: 4779 - DNA, 19 bp, Artificial Sequence
  Primer
agccgagccaaacatacca

SEQ ID NO: 4780 - DNA, 20 bp, Artificial Sequence
  Primer
agcaaacaagaccctcctac

SEQ ID NO: 4781 - DNA, 25 bp, Artificial Sequence
  Primer
aacacgttcacgactcagtatctca

SEQ ID NO: 4782 - DNA, 20 bp, Artificial Sequence
  Primer
agccgagccaaacataccaa

SEQ ID NO: 4783 - DNA, 19 bp, Artificial Sequence
  Primer
agccgagccaaacatacca

SEQ ID NO: 4784 - DNA, 18 bp, Artificial Sequence
  Primer
atgcgagcagatgggtaa

SEQ ID NO: 4785 - DNA, 20 bp, Artificial Sequence
  Primer
gcaaaagcacagaaggaaag

SEQ ID NO: 4786 - DNA, 24 bp, Artificial Sequence
  Primer
cactcagacattttagtagcagca

SEQ ID NO: 4787 - DNA, 20 bp, Artificial Sequence
  Primer
agccgagccaaacataccaa

SEQ ID NO: 4788 - DNA, 22 bp, Artificial Sequence
  Primer
atgtcagccgcaggaagaagag

SEQ ID NO: 4789 - DNA, 20 bp, Artificial Sequence
  Primer
atgtcagccgcaggaagaag

SEQ ID NO: 4790 - DNA, 20 bp, Artificial Sequence
  Primer
cgcaggaagaagagtcacag

SEQ ID NO: 4791 - DNA, 20 bp, Artificial Sequence
  Primer
atgctgagtgagagctgtga

SEQ ID NO: 4792 - DNA, 20 bp, Artificial Sequence
  Primer
atcagcagaagctccactca

SEQ ID NO: 4793 - DNA, 19 bp, Artificial Sequence
  Primer
agccgagccaaacatacca

SEQ ID NO: 4794 - DNA, 22 bp, Artificial Sequence
  Primer
atgtcagccgcaggaagaagag

SEQ ID NO: 4795 - DNA, 19 bp, Artificial Sequence
  Primer
gctatccgcatcaacaact

SEQ ID NO: 4796 - DNA, 20 bp, Artificial Sequence
  Primer
atgtcagccgcaggaagaag

SEQ ID NO: 4797 - DNA, 19 bp, Artificial Sequence
  Primer
tcattttgccgtcaccacc

SEQ ID NO: 4798 - DNA, 20 bp, Artificial Sequence
  Primer
cgcaggaagaagagtcacag

SEQ ID NO: 4799 - DNA, 21 bp, Artificial Sequence
  Primer
ctctttcattttgccgtcacc

SEQ ID NO: 4800 - DNA, 20 bp, Artificial Sequence
  Primer
atcagcagaagctccactca

SEQ ID NO: 4801 - DNA, 25 bp, Artificial Sequence
  Primer
gccaataacgacatcacaatttcct

SEQ ID NO: 4802 - DNA, 20 bp, Artificial Sequence
  Primer
cgcaggaagaagagtcacag

SEQ ID NO: 4803 - DNA, 19 bp, Artificial Sequence
  Primer
gcacagaaggaaagcacag

SEQ ID NO: 4804 - DNA, 18 bp, Artificial Sequence
  Primer
atgcgagcagatgggtaa

SEQ ID NO: 4805 - DNA, 21 bp, Artificial Sequence
  Primer
gcaaacacacagcctccaaaa

SEQ ID NO: 4806 - DNA, 19 bp, Artificial Sequence
  Primer
gcatttcctcgcacaacct

SEQ ID NO: 4807 - DNA, 24 bp, Artificial Sequence
  Primer
gccaataacgacatcacaatttcc

SEQ ID NO: 4808 - DNA, 20 bp, Artificial Sequence
  Primer
acagcatcaccatagtcacc

SEQ ID NO: 4809 - DNA, 25 bp, Artificial Sequence
  Primer
gccaataacgacatcacaatttcct

SEQ ID NO: 4810 - DNA, 20 bp, Artificial Sequence
  Primer
gcaccaaatatgcctgctga

SEQ ID NO: 4811 - DNA, 20 bp, Artificial Sequence
  Primer
ccaaatatgcctgctgacaa

SEQ ID NO: 4812 - DNA, 24 bp, Artificial Sequence
  Primer
gccaataacgacatcacaatttcc

SEQ ID NO: 4813 - DNA, 21 bp, Artificial Sequence
  Primer
acaacagcatcaccatagtca

SEQ ID NO: 4814 - DNA, 19 bp, Artificial Sequence
  Primer
agagcaagtccgatggcaa

SEQ ID NO: 4815 - DNA, 22 bp, Artificial Sequence
  Primer
caaatatgcctgctgacaacaa

SEQ ID NO: 4816 - DNA, 20 bp, Artificial Sequence
  Primer
acagcatcaccatagtcacc

SEQ ID NO: 4817 - DNA, 20 bp, Artificial Sequence
  Primer
gcaaaagcacagaaggaaag

SEQ ID NO: 4818 - DNA, 20 bp, Artificial Sequence
  Primer
gtttacatagcccatctgcc

SEQ ID NO: 4819 - DNA, 25 bp, Artificial Sequence
  Primer
gccaataacgacatcacaatttcct

SEQ ID NO: 4820 - DNA, 19 bp, Artificial Sequence
  Primer
gcatcgtcctcttcttcct

SEQ ID NO: 4821 - DNA, 19 bp, Artificial Sequence
  Primer
atgtcagccgcaggaagaa

SEQ ID NO: 4822 - DNA, 25 bp, Artificial Sequence
  Primer
gccaataacgacatcacaatttcct

SEQ ID NO: 4823 - DNA, 20 bp, Artificial Sequence
  Primer
gtttacatagcccatctgcc

SEQ ID NO: 4824 - DNA, 19 bp, Artificial Sequence
  Primer
tgaagcaccaccaaaggac

SEQ ID NO: 4825 - DNA, 25 bp, Artificial Sequence
  Primer
accgtcagcacaagcaaaagcaaag

SEQ ID NO: 4826 - DNA, 25 bp, Artificial Sequence
  Primer
taccgtcagcacaagcaaaagcaaa

SEQ ID NO: 4827 - DNA, 24 bp, Artificial Sequence
  Primer
taccgtcagcacaagcaaaagcaa

SEQ ID NO: 4828 - DNA, 20 bp, Artificial Sequence
  Primer
tcagtgagcagaggtggcaa

SEQ ID NO: 4829 - DNA, 20 bp, Artificial Sequence
  Primer
agcaaacaagaccctcctac

SEQ ID NO: 4830 - DNA, 21 bp, Artificial Sequence
  Primer
ccaagaacacactcagacatt

SEQ ID NO: 4831 - DNA, 23 bp, Artificial Sequence
  Primer
cgtcagcacaagcaaaagcaaag

SEQ ID NO: 4832 - DNA, 22 bp, Artificial Sequence
  Primer
cgtcagcacaagcaaaagcaaa

SEQ ID NO: 4833 - DNA, 21 bp, Artificial Sequence
  Primer
cgtcagcacaagcaaaagcaa

SEQ ID NO: 4834 - DNA, 22 bp, Artificial Sequence
  Primer
caacagcatcaccatagtcacc

SEQ ID NO: 4835 - DNA, 21 bp, Artificial Sequence
  Primer
taccgtcagcacaagcaaaag

SEQ ID NO: 4836 - DNA, 20 bp, Artificial Sequence
  Primer
taccgtcagcacaagcaaaa

SEQ ID NO: 4837 - DNA, 19 bp, Artificial Sequence
  Primer
taccgtcagcacaagcaaa

SEQ ID NO: 4838 - DNA, 20 bp, Artificial Sequence
  Primer
ttacatagcccatctgcctt

SEQ ID NO: 4839 - DNA, 20 bp, Artificial Sequence
  Primer
tcgtcctcttcttcctcatc

SEQ ID NO: 4840 - DNA, 22 bp, Artificial Sequence
  Primer
gaagcagagaaagatgccaaaa

SEQ ID NO: 4841 - DNA, 21 bp, Artificial Sequence
  Primer
gaagcagagaaagatgccaaa

SEQ ID NO: 4842 - DNA, 20 bp, Artificial Sequence
  Primer
gaagcagagaaagatgccaa

SEQ ID NO: 4843 - DNA, 20 bp, Artificial Sequence
  Primer
tccagaaagcaaacaagacc

SEQ ID NO: 4844 - DNA, 20 bp, Artificial Sequence
  Primer
ccagaaagcaaacaagaccc

SEQ ID NO: 4845 - DNA, 22 bp, Artificial Sequence
  Primer
gcagaaaggctaaaaagcacaa

SEQ ID NO: 4846 - DNA, 22 bp, Artificial Sequence
  Primer
gccacaaggttaaagtcattca

SEQ ID NO: 4847 - DNA, 21 bp, Artificial Sequence
  Primer
gcccaaaagattagacaacca

SEQ ID NO: 4848 - DNA, 22 bp, Artificial Sequence
  Primer
cataaagtagtaggcagcacaa

SEQ ID NO: 4849 - DNA, 21 bp, Artificial Sequence
  Primer
agcatcaccatagtcaccttt

SEQ ID NO: 4850 - DNA, 18 bp, Artificial Sequence
  Primer
taaagccccactgctgaa

SEQ ID NO: 4851 - DNA, 18 bp, Artificial Sequence
  Primer
taaagccccactgctgaa

SEQ ID NO: 4852 - DNA, 18 bp, Artificial Sequence
  Primer
taaagccccactgctgaa

SEQ ID NO: 4853 - DNA, 19 bp, Artificial Sequence
  Primer
ttcatcgcatcaacaccac

SEQ ID NO: 4854 - DNA, 21 bp, Artificial Sequence
  Primer
gcatcaccatagtcacctttt

SEQ ID NO: 4855 - DNA, 19 bp, Artificial Sequence
  Primer
aagccaatccacgcacgaa

SEQ ID NO: 4856 - DNA, 22 bp, Artificial Sequence
  Primer
gcagaaaggctaaaaagcacaa

SEQ ID NO: 4857 - DNA, 22 bp, Artificial Sequence
  Primer
gcatcaccatagtcaccttttt

SEQ ID NO: 4858 - DNA, 20 bp, Artificial Sequence
  Primer
caacagtagtgcccaaaaga

SEQ ID NO: 4859 - DNA, 19 bp, Artificial Sequence
  Primer
acaactgtcacctgtcact

SEQ ID NO: 4860 - DNA, 20 bp, Artificial Sequence
  Primer
tccataggctaaatccagca

SEQ ID NO: 4861 - DNA, 20 bp, Artificial Sequence
  Primer
cccagcaccatacctctatt

SEQ ID NO: 4862 - DNA, 21 bp, Artificial Sequence
  Primer
ccaacataggcaaacacacag

SEQ ID NO: 4863 - DNA, 24 bp, Artificial Sequence
  Primer
gcatcaccatagtcacctttttca

SEQ ID NO: 4864 - DNA, 22 bp, Artificial Sequence
  Primer
cttttcacatagggcatcaaca

SEQ ID NO: 4865 - DNA, 21 bp, Artificial Sequence
  Primer
cacaacagcatcaccatagtc

SEQ ID NO: 4866 - DNA, 24 bp, Artificial Sequence
  Primer
tatagcagccaacataggcaaaca

SEQ ID NO: 4867 - DNA, 20 bp, Artificial Sequence
  Primer
acagcatcaccatagtcacc

SEQ ID NO: 4868 - DNA, 20 bp, Artificial Sequence
  Primer
agcatcaccatagtcacctt

SEQ ID NO: 4869 - DNA, 21 bp, Artificial Sequence
  Primer
agcatcaccatagtcaccttt

SEQ ID NO: 4870 - DNA, 21 bp, Artificial Sequence
  Primer
gcatcaccatagtcacctttt

SEQ ID NO: 4871 - DNA, 22 bp, Artificial Sequence
  Primer
gcatcaccatagtcaccttttt

SEQ ID NO: 4872 - DNA, 23 bp, Artificial Sequence
  Primer
gcatcaccatagtcacctttttc

SEQ ID NO: 4873 - DNA, 20 bp, Artificial Sequence
  Primer
gataacagcagcatacagcc

SEQ ID NO: 4874 - DNA, 23 bp, Artificial Sequence
  Primer
ccttttcacatagggcatcaaca

SEQ ID NO: 4875 - DNA, 21 bp, Artificial Sequence
  Primer
tccttccactctaccatcaaa

SEQ ID NO: 4876 - DNA, 20 bp, Artificial Sequence
  Primer
tccagaaagcaaacaagacc

SEQ ID NO: 4877 - DNA, 20 bp, Artificial Sequence
  Primer
ccagaaagcaaacaagaccc

SEQ ID NO: 4878 - DNA, 22 bp, Artificial Sequence
  Primer
cttccactctaccatcaaacaa

SEQ ID NO: 4879 - DNA, 22 bp, Artificial Sequence
  Primer
tatagcagccaacataggcaaa

SEQ ID NO: 4880 - DNA, 21 bp, Artificial Sequence
  Primer
tatagcagccaacataggcaa

SEQ ID NO: 4881 - DNA, 20 bp, Artificial Sequence
  Primer
cgcatcaacaccacagaaaa

SEQ ID NO: 4882 - DNA, 21 bp, Artificial Sequence
  Primer
tacctgtccttccactctacc

SEQ ID NO: 4883 - DNA, 19 bp, Artificial Sequence
  Primer
cgcatcaacaccacagaaa

SEQ ID NO: 4884 - DNA, 19 bp, Artificial Sequence
  Primer
tgccagcctgaacaagaaa

SEQ ID NO: 4885 - DNA, 21 bp, Artificial Sequence
  Primer
gagaaaaagtggcgagtagag

SEQ ID NO: 4886 - DNA, 18 bp, Artificial Sequence
  Primer
tgccagcctgaacaagaa

SEQ ID NO: 4887 - DNA, 21 bp, Artificial Sequence
  Primer
atgagaaaaagtggcgagtag

SEQ ID NO: 4888 - DNA, 21 bp, Artificial Sequence
  Primer
acaatgagaaaaagtggcgag

SEQ ID NO: 4889 - DNA, 19 bp, Artificial Sequence
  Primer
caaacacacagcctccaaa

SEQ ID NO: 4890 - DNA, 22 bp, Artificial Sequence
  Primer
gagcagcaacaatgagaaaaag

SEQ ID NO: 4891 - DNA, 24 bp, Artificial Sequence
  Primer
gcatcaccatagtcacctttttca

SEQ ID NO: 4892 - DNA, 22 bp, Artificial Sequence
  Primer
cactctaccatcaaacaagaca

SEQ ID NO: 4893 - DNA, 18 bp, Artificial Sequence
  Primer
atgcgagcagatgggtaa

SEQ ID NO: 4894 - DNA, 19 bp, Artificial Sequence
  Primer
tgaagcaccaccaaaggac

SEQ ID NO: 4895 - DNA, 19 bp, Artificial Sequence
  Primer
atgcaacagggtacacaga

SEQ ID NO: 4896 - DNA, 20 bp, Artificial Sequence
  Primer
caaacacacagcctccaaaa

SEQ ID NO: 4897 - DNA, 21 bp, Artificial Sequence
  Primer
ggcacactgataaacaccaga

SEQ ID NO: 4898 - DNA, 19 bp, Artificial Sequence
  Primer
aacacacagcctccaaaac

SEQ ID NO: 4899 - DNA, 21 bp, Artificial Sequence
  Primer
cccagcaccatacctctattt

SEQ ID NO: 4900 - DNA, 22 bp, Artificial Sequence
  Primer
ccactctaccatcaaacaagac

SEQ ID NO: 4901 - DNA, 21 bp, Artificial Sequence
  Primer
gagaaaaagtggcgagtagag

SEQ ID NO: 4902 - DNA, 22 bp, Artificial Sequence
  Primer
aatgagaaaaagtggcgagtag

SEQ ID NO: 4903 - DNA, 21 bp, Artificial Sequence
  Primer
acaatgagaaaaagtggcgag

SEQ ID NO: 4904 - DNA, 20 bp, Artificial Sequence
  Primer
gattcatcgcatcaacacca

SEQ ID NO: 4905 - DNA, 23 bp, Artificial Sequence
  Primer
ttactactctaacagaaccctcc

SEQ ID NO: 4906 - DNA, 20 bp, Artificial Sequence
  Primer
acctgtccttccactctacc

SEQ ID NO: 4907 - DNA, 20 bp, Artificial Sequence
  Primer
tgtccttccactctaccatc

SEQ ID NO: 4908 - DNA, 24 bp, Artificial Sequence
  Primer
gcatcaccatagtcacctttttca

SEQ ID NO: 4909 - DNA, 20 bp, Artificial Sequence
  Primer
tcgtcctcttcttcctcatc

SEQ ID NO: 4910 - DNA, 20 bp, Artificial Sequence
  Primer
cacacagcctccaaaacatc

SEQ ID NO: 4911 - DNA, 21 bp, Artificial Sequence
  Primer
agccataacctttccacattc

SEQ ID NO: 4912 - DNA, 23 bp, Artificial Sequence
  Primer
ttactactctaacagaaccctcc

SEQ ID NO: 4913 - DNA, 19 bp, Artificial Sequence
  Primer
tgccagcctgaacaagaaa

SEQ ID NO: 4914 - DNA, 22 bp, Artificial Sequence
  Primer
gcagatgggtaatagagagcaa

SEQ ID NO: 4915 - DNA, 22 bp, Artificial Sequence
  Primer
gcagatgggtaatagagagcaa

SEQ ID NO: 4916 - DNA, 18 bp, Artificial Sequence
  Primer
tgccagcctgaacaagaa

SEQ ID NO: 4917 - DNA, 21 bp, Artificial Sequence
  Primer
ctacagccataacctttccac

SEQ ID NO: 4918 - DNA, 21 bp, Artificial Sequence
  Primer
ggcacactgataaacaccaga

SEQ ID NO: 4919 - DNA, 22 bp, Artificial Sequence
  Primer
tcctcttcttcttcctcaactc

SEQ ID NO: 4920 - DNA, 22 bp, Artificial Sequence
  Primer
cactctaccatcaaacaagaca

SEQ ID NO: 4921 - DNA, 20 bp, Artificial Sequence
  Primer
caactgtcacctgtcacttc

SEQ ID NO: 4922 - DNA, 21 bp, Artificial Sequence
  Primer
ggcaaacacacagcctccaaa

SEQ ID NO: 4923 - DNA, 20 bp, Artificial Sequence
  Primer
ggcaaacacacagcctccaa

SEQ ID NO: 4924 - DNA, 22 bp, Artificial Sequence
  Primer
agccaacataggcaaacacaca

SEQ ID NO: 4925 - DNA, 23 bp, Artificial Sequence
  Primer
cctctacatcaaagccaatccac

SEQ ID NO: 4926 - DNA, 22 bp, Artificial Sequence
  Primer
gcagccaacataggcaaacaca

SEQ ID NO: 4927 - DNA, 19 bp, Artificial Sequence
  Primer
tgaagcaccaccaaaggac

SEQ ID NO: 4928 - DNA, 21 bp, Artificial Sequence
  Primer
agcagccaacataggcaaaca

SEQ ID NO: 4929 - DNA, 19 bp, Artificial Sequence
  Primer
cagccaacataggcaaaca

SEQ ID NO: 4930 - DNA, 18 bp, Artificial Sequence
  Primer
gcagccaacataggcaaa

SEQ ID NO: 4931 - DNA, 18 bp, Artificial Sequence
  Primer
tgtgactccattgacgct

SEQ ID NO: 4932 - DNA, 18 bp, Artificial Sequence
  Primer
agcagccaacataggcaa

SEQ ID NO: 4933 - DNA, 20 bp, Artificial Sequence
  Primer
gcaccaaatatgcctgctga

SEQ ID NO: 4934 - DNA, 19 bp, Artificial Sequence
  Primer
taggcagcacaagtcacca

SEQ ID NO: 4935 - DNA, 20 bp, Artificial Sequence
  Primer
ccaacaaagccaacatctca

SEQ ID NO: 4936 - DNA, 20 bp, Artificial Sequence
  Primer
ccaaatatgcctgctgacaa

SEQ ID NO: 4937 - DNA, 21 bp, Artificial Sequence
  Primer
ccaataacaagccatccgaaa

SEQ ID NO: 4938 - DNA, 20 bp, Artificial Sequence
  Primer
gattcatcgcatcaacacca

SEQ ID NO: 4939 - DNA, 20 bp, Artificial Sequence
  Primer
aggttacccgtaaagcccca

SEQ ID NO: 4940 - DNA, 21 bp, Artificial Sequence
  Primer
ccaataacaagccatccgaaa

SEQ ID NO: 4941 - DNA, 19 bp, Artificial Sequence
  Primer
aagccaatccacgcacgaa

SEQ ID NO: 4942 - DNA, 18 bp, Artificial Sequence
  Primer
tcaaagccaatccacgca

SEQ ID NO: 4943 - DNA, 21 bp, Artificial Sequence
  Primer
ccaataacaagccatccgaaa

SEQ ID NO: 4944 - DNA, 22 bp, Artificial Sequence
  Primer
cctctacatcaaagccaatcca

SEQ ID NO: 4945 - DNA, 20 bp, Artificial Sequence
  Primer
gccctctacatcaaagccaa

SEQ ID NO: 4946 - DNA, 19 bp, Artificial Sequence
  Primer
gccctctacatcaaagcca

SEQ ID NO: 4947 - DNA, 20 bp, Artificial Sequence
  Primer
aagccaatccacgcacgaac

SEQ ID NO: 4948 - DNA, 22 bp, Artificial Sequence
  Primer
caaatatgcctgctgacaacaa

SEQ ID NO: 4949 - DNA, 19 bp, Artificial Sequence
  Primer
ttagcagcatcaccagcac

SEQ ID NO: 4950 - DNA, 19 bp, Artificial Sequence
  Primer
tcaaagccaatccacgcac

SEQ ID NO: 4951 - DNA, 20 bp, Artificial Sequence
  Primer
aggttacccgtaaagcccca

SEQ ID NO: 4952 - DNA, 21 bp, Artificial Sequence
  Primer
ctacagccataacctttccac

SEQ ID NO: 4953 - DNA, 19 bp, Artificial Sequence
  Primer
cgcatcaacaccacagaaa

SEQ ID NO: 4954 - DNA, 24 bp, Artificial Sequence
  Primer
ctgtgtaataaaccaagaagtgcc

SEQ ID NO: 4955 - DNA, 21 bp, Artificial Sequence
  Primer
tctacatcaaagccaatccac

SEQ ID NO: 4956 - DNA, 22 bp, Artificial Sequence
  Primer
caataataccaccagccactac

SEQ ID NO: 4957 - DNA, 18 bp, Artificial Sequence
  Primer
tgcctgaaatgtcgccaa

SEQ ID NO: 4958 - DNA, 20 bp, Artificial Sequence
  Primer
cgcatcaacaccacagaaaa

SEQ ID NO: 4959 - DNA, 21 bp, Artificial Sequence
  Primer
cggagaggcacattgagaaga

SEQ ID NO: 4960 - DNA, 20 bp, Artificial Sequence
  Primer
cggagaggcacattgagaag

SEQ ID NO: 4961 - DNA, 18 bp, Artificial Sequence
  Primer
tcaaagccaatccacgca

SEQ ID NO: 4962 - DNA, 19 bp, Artificial Sequence
  Primer
agccgagccaaacatacca

SEQ ID NO: 4963 - DNA, 23 bp, Artificial Sequence
  Primer
ttactactctaacagaaccctcc

SEQ ID NO: 4964 - DNA, 18 bp, Artificial Sequence
  Primer
caatgaagccgagccaaa

SEQ ID NO: 4965 - DNA, 19 bp, Artificial Sequence
  Primer
aagccaatccacgcacgaa

SEQ ID NO: 4966 - DNA, 24 bp, Artificial Sequence
  Primer
gccaataacgacatcacaatttcc

SEQ ID NO: 4967 - DNA, 19 bp, Artificial Sequence
  Primer
aagccgagccaaacatacc

SEQ ID NO: 4968 - DNA, 19 bp, Artificial Sequence
  Primer
gaagccgagccaaacatac

SEQ ID NO: 4969 - DNA, 18 bp, Artificial Sequence
  Primer
aatgaagccgagccaaac

SEQ ID NO: 4970 - DNA, 18 bp, Artificial Sequence
  Primer
caatgaagccgagccaaa

SEQ ID NO: 4971 - DNA, 18 bp, Artificial Sequence
  Primer
tcaaagccaatccacgca

SEQ ID NO: 4972 - DNA, 22 bp, Artificial Sequence
  Primer
cctctacatcaaagccaatcca

SEQ ID NO: 4973 - DNA, 20 bp, Artificial Sequence
  Primer
gccctctacatcaaagccaa

SEQ ID NO: 4974 - DNA, 19 bp, Artificial Sequence
  Primer
gccctctacatcaaagcca

SEQ ID NO: 4975 - DNA, 24 bp, Artificial Sequence
  Primer
gccaataacgacatcacaatttcc

SEQ ID NO: 4976 - DNA, 20 bp, Artificial Sequence
  Primer
aagccaatccacgcacgaac

SEQ ID NO: 4977 - DNA, 21 bp, Artificial Sequence
  Primer
tccaagaacacactcagacat

SEQ ID NO: 4978 - DNA, 19 bp, Artificial Sequence
  Primer
aagcacagaaggaaagcac

SEQ ID NO: 4979 - DNA, 19 bp, Artificial Sequence
  Primer
ttagcagcatcaccagcac

SEQ ID NO: 4980 - DNA, 20 bp, Artificial Sequence
  Primer
aggttacccgtaaagcccca

SEQ ID NO: 4981 - DNA, 19 bp, Artificial Sequence
  Primer
tcaaagccaatccacgcac

SEQ ID NO: 4982 - DNA, 21 bp, Artificial Sequence
  Primer
tccaagaacacactcagacat

SEQ ID NO: 4983 - DNA, 24 bp, Artificial Sequence
  Primer
gccaataacgacatcacaatttcc

SEQ ID NO: 4984 - DNA, 19 bp, Artificial Sequence
  Primer
gcacccttcaactttgcct

SEQ ID NO: 4985 - DNA, 21 bp, Artificial Sequence
  Primer
tctacatcaaagccaatccac

SEQ ID NO: 4986 - DNA, 18 bp, Artificial Sequence
  Primer
acctttccacattccgca

SEQ ID NO: 4987 - DNA, 20 bp, Artificial Sequence
  Primer
agcaaacaagaccctcctac

SEQ ID NO: 4988 - DNA, 22 bp, Artificial Sequence
  Primer
caagaataccacgaaagcaaga

SEQ ID NO: 4989 - DNA, 20 bp, Artificial Sequence
  Primer
gaaagcaaacaagaccctcc

SEQ ID NO: 4990 - DNA, 20 bp, Artificial Sequence
  Primer
acagccataacctttccaca

SEQ ID NO: 4991 - DNA, 21 bp, Artificial Sequence
  Primer
gcaagaataccacgaaagcaa

SEQ ID NO: 4992 - DNA, 21 bp, Artificial Sequence
  Primer
ccaagaacacactcagacatt

SEQ ID NO: 4993 - DNA, 22 bp, Artificial Sequence
  Primer
caagaataccacgaaagcaaga

SEQ ID NO: 4994 - DNA, 22 bp, Artificial Sequence
  Primer
cctctacatcaaagccaatcca

SEQ ID NO: 4995 - DNA, 20 bp, Artificial Sequence
  Primer
gccctctacatcaaagccaa

SEQ ID NO: 4996 - DNA, 19 bp, Artificial Sequence
  Primer
gaagccgagccaaacatac

SEQ ID NO: 4997 - DNA, 19 bp, Artificial Sequence
  Primer
gccctctacatcaaagcca

SEQ ID NO: 4998 - DNA, 20 bp, Artificial Sequence
  Primer
gctcagagtcatcctcatca

SEQ ID NO: 4999 - DNA, 20 bp, Artificial Sequence
  Primer
cacttccaacaaagccaaca

SEQ ID NO: 5000 - DNA, 18 bp, Artificial Sequence
  Primer
gcacttccaacaaagcca

SEQ ID NO: 5001 - DNA, 18 bp, Artificial Sequence
  Primer
gcagcgacaagcaaaaga

SEQ ID NO: 5002 - DNA, 18 bp, Artificial Sequence
  Primer
tcaaagccaatccacgca

SEQ ID NO: 5003 - DNA, 22 bp, Artificial Sequence
  Primer
cctctacatcaaagccaatcca

SEQ ID NO: 5004 - DNA, 20 bp, Artificial Sequence
  Primer
gcacttccaacaaagccaac

SEQ ID NO: 5005 - DNA, 19 bp, Artificial Sequence
  Primer
gccctctacatcaaagcca

SEQ ID NO: 5006 - DNA, 20 bp, Artificial Sequence
  Primer
aggttacccgtaaagcccca

SEQ ID NO: 5007 - DNA, 21 bp, Artificial Sequence
  Primer
actacagccataacctttcca

SEQ ID NO: 5008 - DNA, 20 bp, Artificial Sequence
  Primer
gacacatctaaagcacccac

SEQ ID NO: 5009 - DNA, 22 bp, Artificial Sequence
  Primer
gcctatcctcagaataaccacc

SEQ ID NO: 5010 - DNA, 23 bp, Artificial Sequence
  Primer
ttactactctaacagaaccctcc

SEQ ID NO: 5011 - DNA, 19 bp, Artificial Sequence
  Primer
gcacccttcaactttgcct

SEQ ID NO: 5012 - DNA, 18 bp, Artificial Sequence
  Primer
tcagcagcaagaacgcaa

SEQ ID NO: 5013 - DNA, 22 bp, Artificial Sequence
  Primer
gcaggcataagtatctgatgaa

SEQ ID NO: 5014 - DNA, 18 bp, Artificial Sequence
  Primer
tgaagcaccaccaaagga

SEQ ID NO: 5015 - DNA, 20 bp, Artificial Sequence
  Primer
cacttccaacaaagccaaca

SEQ ID NO: 5016 - DNA, 18 bp, Artificial Sequence
  Primer
gcacttccaacaaagcca

SEQ ID NO: 5017 - DNA, 22 bp, Artificial Sequence
  Primer
tggcatctacaatacagacaac

SEQ ID NO: 5018 - DNA, 19 bp, Artificial Sequence
  Primer
tcaaagccaatccacgcac

SEQ ID NO: 5019 - DNA, 22 bp, Artificial Sequence
  Primer
gcctatcctcagaataaccacc

SEQ ID NO: 5020 - DNA, 22 bp, Artificial Sequence
  Primer
tgcctatcctcagaataaccac

SEQ ID NO: 5021 - DNA, 20 bp, Artificial Sequence
  Primer
gcacttccaacaaagccaac

SEQ ID NO: 5022 - DNA, 19 bp, Artificial Sequence
  Primer
catcgcatcaacaccacag

SEQ ID NO: 5023 - DNA, 21 bp, Artificial Sequence
  Primer
tctacatcaaagccaatccac

SEQ ID NO: 5024 - DNA, 21 bp, Artificial Sequence
  Primer
cctctacatcaaagccaatcc

SEQ ID NO: 5025 - DNA, 19 bp, Artificial Sequence
  Primer
agccctctacatcaaagcc

SEQ ID NO: 5026 - DNA, 20 bp, Artificial Sequence
  Primer
tgacagccctctacatcaaa

SEQ ID NO: 5027 - DNA, 20 bp, Artificial Sequence
  Primer
atgacagccctctacatcaa

SEQ ID NO: 5028 - DNA, 18 bp, Artificial Sequence
  Primer
aatgcctgaaatgtcgcc

SEQ ID NO: 5029 - DNA, 22 bp, Artificial Sequence
  Primer
gcctatcctcagaataaccacc

SEQ ID NO: 5030 - DNA, 19 bp, Artificial Sequence
  Primer
agcaagaaccacaagagca

SEQ ID NO: 5031 - DNA, 20 bp, Artificial Sequence
  Primer
gtttacatagcccatctgcc

SEQ ID NO: 5032 - DNA, 21 bp, Artificial Sequence
  Primer
ctgaaatgtcgccaagatcaa

SEQ ID NO: 5033 - DNA, 19 bp, Artificial Sequence
  Primer
tcaaagccaatccacgcac

SEQ ID NO: 5034 - DNA, 19 bp, Artificial Sequence
  Primer
acaactgtcacctgtcact

SEQ ID NO: 5035 - DNA, 18 bp, Artificial Sequence
  Primer
tgcctgaaatgtcgccaa

SEQ ID NO: 5036 - DNA, 21 bp, Artificial Sequence
  Primer
tctacatcaaagccaatccac

SEQ ID NO: 5037 - DNA, 21 bp, Artificial Sequence
  Primer
cctctacatcaaagccaatcc

SEQ ID NO: 5038 - DNA, 24 bp, Artificial Sequence
  Primer
ctgtgtaataaaccaagaagtgcc

SEQ ID NO: 5039 - DNA, 21 bp, Artificial Sequence
  Primer
ctgaaatgtcgccaagatcaa

SEQ ID NO: 5040 - DNA, 19 bp, Artificial Sequence
  Primer
agccctctacatcaaagcc

SEQ ID NO: 5041 - DNA, 20 bp, Artificial Sequence
  Primer
tgacagccctctacatcaaa

SEQ ID NO: 5042 - DNA, 20 bp, Artificial Sequence
  Primer
atgacagccctctacatcaa

SEQ ID NO: 5043 - DNA, 21 bp, Artificial Sequence
  Primer
ccaagaacacactcagacatt

SEQ ID NO: 5044 - DNA, 21 bp, Artificial Sequence
  Primer
tccaagaacacactcagacat

SEQ ID NO: 5045 - DNA, 23 bp, Artificial Sequence
  Primer
cctctacatcaaagccaatccac

SEQ ID NO: 5046 - DNA, 20 bp, Artificial Sequence
  Primer
atcagcagaagctccactca

SEQ ID NO: 5047 - DNA, 21 bp, Artificial Sequence
  Primer
cctctacatcaaagccaatcc

SEQ ID NO: 5048 - DNA, 20 bp, Artificial Sequence
  Primer
gcatcaacaccacagaaaac

SEQ ID NO: 5049 - DNA, 19 bp, Artificial Sequence
  Primer
agccctctacatcaaagcc

SEQ ID NO: 5050 - DNA, 20 bp, Artificial Sequence
  Primer
atcagcagaagctccactca

SEQ ID NO: 5051 - DNA, 20 bp, Artificial Sequence
  Primer
tccaagaacacactcagaca

SEQ ID NO: 5052 - DNA, 22 bp, Artificial Sequence
  Primer
gccattttcctaaaaccactct

SEQ ID NO: 5053 - DNA, 20 bp, Artificial Sequence
  Primer
atcagcagaagctccactca

SEQ ID NO: 5054 - DNA, 20 bp, Artificial Sequence
  Primer
agattcatcgcatcaacacc

SEQ ID NO: 5055 - DNA, 23 bp, Artificial Sequence
  Primer
cctctacatcaaagccaatccac

SEQ ID NO: 5056 - DNA, 20 bp, Artificial Sequence
  Primer
atcagcagaagctccactca

SEQ ID NO: 5057 - DNA, 21 bp, Artificial Sequence
  Primer
cctctacatcaaagccaatcc

SEQ ID NO: 5058 - DNA, 21 bp, Artificial Sequence
  Primer
cgttcacgactcagtatctca

SEQ ID NO: 5059 - DNA, 19 bp, Artificial Sequence
  Primer
agccctctacatcaaagcc

SEQ ID NO: 5060 - DNA, 19 bp, Artificial Sequence
  Primer
gcaagattagcagaagccc

SEQ ID NO: 5061 - DNA, 20 bp, Artificial Sequence
  Primer
cagcaagattagcagaagcc

SEQ ID NO: 5062 - DNA, 20 bp, Artificial Sequence
  Primer
ccaaatatgcctgctgacaa

SEQ ID NO: 5063 - DNA, 19 bp, Artificial Sequence
  Primer
gcacccttcaactttgcct

SEQ ID NO: 5064 - DNA, 19 bp, Artificial Sequence
  Primer
gcaagattagcagaagccc

SEQ ID NO: 5065 - DNA, 18 bp, Artificial Sequence
  Primer
gcagcgacaagcaaaaga

SEQ ID NO: 5066 - DNA, 20 bp, Artificial Sequence
  Primer
gtttacatagcccatctgcc

SEQ ID NO: 5067 - DNA, 20 bp, Artificial Sequence
  Primer
atcagcagaagctccactca

SEQ ID NO: 5068 - DNA, 20 bp, Artificial Sequence
  Primer
cagcaagattagcagaagcc

SEQ ID NO: 5069 - DNA, 22 bp, Artificial Sequence
  Primer
caaatatgcctgctgacaacaa

SEQ ID NO: 5070 - DNA, 20 bp, Artificial Sequence
  Primer
gtttacatagcccatctgcc

SEQ ID NO: 5071 - DNA, 20 bp, Artificial Sequence
  Primer
tccaagaacacactcagaca

SEQ ID NO: 5072 - DNA, 19 bp, Artificial Sequence
  Primer
cagcaccaaatgtccatcc

SEQ ID NO: 5073 - DNA, 19 bp, Artificial Sequence
  Primer
gcaagattagcagaagccc

SEQ ID NO: 5074 - DNA, 20 bp, Artificial Sequence
  Primer
cagcaagattagcagaagcc

SEQ ID NO: 5075 - DNA, 20 bp, Artificial Sequence
  Primer
atcagcagaagctccactca

SEQ ID NO: 5076 - DNA, 20 bp, Artificial Sequence
  Primer
gtttacatagcccatctgcc

SEQ ID NO: 5077 - DNA, 20 bp, Artificial Sequence
  Primer
atcagcagaagctccactca

SEQ ID NO: 5078 - DNA, 18 bp, Artificial Sequence
  Primer
agcagccaacataggcaa

SEQ ID NO: 5079 - DNA, 18 bp, Artificial Sequence
  Primer
gcagccaacataggcaaa

SEQ ID NO: 5080 - DNA, 19 bp, Artificial Sequence
  Primer
ttcatcgcatcaacaccac

SEQ ID NO: 5081 - DNA, 20 bp, Artificial Sequence
  Primer
gtttacatagcccatctgcc

SEQ ID NO: 5082 - DNA, 22 bp, Artificial Sequence
  Primer
caataataccaccagccactac

SEQ ID NO: 5083 - DNA, 21 bp, Artificial Sequence
  Primer
tttcacatagggcatcaacag

SEQ ID NO: 5084 - DNA, 19 bp, Artificial Sequence
  Primer
gcaagcagaggtagcaaaa

SEQ ID NO: 5085 - DNA, 19 bp, Artificial Sequence
  Primer
cgcaagcagaggtagcaaa

SEQ ID NO: 5086 - DNA, 19 bp, Artificial Sequence
  Primer
cagccaacataggcaaaca

SEQ ID NO: 5087 - DNA, 19 bp, Artificial Sequence
  Primer
tcaaagccaatccacgcac

SEQ ID NO: 5088 - DNA, 21 bp, Artificial Sequence
  Primer
gtaacatcagcaccatccaag

SEQ ID NO: 5089 - DNA, 20 bp, Artificial Sequence
  Primer
aagccaatccacgcacgaac

SEQ ID NO: 5090 - DNA, 20 bp, Artificial Sequence
  Primer
gttttccacataagcagcca

SEQ ID NO: 5091 - DNA, 20 bp, Artificial Sequence
  Primer
gttttccacataagcagcca

SEQ ID NO: 5092 - DNA, 20 bp, Artificial Sequence
  Primer
gaaagcaaacaagaccctcc

SEQ ID NO: 5093 - DNA, 20 bp, Artificial Sequence
  Primer
agcaaacaagaccctcctac

SEQ ID NO: 5094 - DNA, 20 bp, Artificial Sequence
  Primer
cgcaggaagaagagtcacag

SEQ ID NO: 5095 - DNA, 20 bp, Artificial Sequence
  Primer
atcagcagaagctccactca

SEQ ID NO: 5096 - DNA, 20 bp, Artificial Sequence
  Primer
gattcatcgcatcaacacca

SEQ ID NO: 5097 - DNA, 19 bp, Artificial Sequence
  Primer
gtgatgaggagcgagaaga

SEQ ID NO: 5098 - DNA, 20 bp, Artificial Sequence
  Primer
gttttccacataagcagcca

SEQ ID NO: 5099 - DNA, 21 bp, Artificial Sequence
  Primer
ttccacataagcagccataag

SEQ ID NO: 5100 - DNA, 19 bp, Artificial Sequence
  Primer
gccctctacatcaaagcca

SEQ ID NO: 5101 - DNA, 21 bp, Artificial Sequence
  Primer
ttccacataagcagccataag

SEQ ID NO: 5102 - DNA, 22 bp, Artificial Sequence
  Primer
cctctacatcaaagccaatcca

SEQ ID NO: 5103 - DNA, 21 bp, Artificial Sequence
  Primer
ttccacataagcagccataag

SEQ ID NO: 5104 - DNA, 18 bp, Artificial Sequence
  Primer
tcaaagccaatccacgca

SEQ ID NO: 5105 - DNA, 19 bp, Artificial Sequence
  Primer
tgaaggacaggcaaactga

SEQ ID NO: 5106 - DNA, 20 bp, Artificial Sequence
  Primer
gttttccacataagcagcca

SEQ ID NO: 5107 - DNA, 21 bp, Artificial Sequence
  Primer
aagaatcggacaccatagtca

SEQ ID NO: 5108 - DNA, 24 bp, Artificial Sequence
  Primer
ggacttgccatcaaaaactatgac

SEQ ID NO: 5109 - DNA, 18 bp, Artificial Sequence
  Primer
accctttgctaactcgct

SEQ ID NO: 5110 - DNA, 19 bp, Artificial Sequence
  Primer
tgaaggacaggcaaactga

SEQ ID NO: 5111 - DNA, 21 bp, Artificial Sequence
  Primer
acagaagcagacttagaagca

SEQ ID NO: 5112 - DNA, 19 bp, Artificial Sequence
  Primer
gccctctacatcaaagcca

SEQ ID NO: 5113 - DNA, 20 bp, Artificial Sequence
  Primer
ccagaaagcaaacaagaccc

SEQ ID NO: 5114 - DNA, 22 bp, Artificial Sequence
  Primer
cctctacatcaaagccaatcca

SEQ ID NO: 5115 - DNA, 19 bp, Artificial Sequence
  Primer
ctttccacattccgcagac

SEQ ID NO: 5116 - DNA, 20 bp, Artificial Sequence
  Primer
tgatgaggagcgagaagagg

SEQ ID NO: 5117 - DNA, 20 bp, Artificial Sequence
  Primer
cgtgatgaggagcgagaaga

SEQ ID NO: 5118 - DNA, 20 bp, Artificial Sequence
  Primer
tgatgaggagcgagaagagg

SEQ ID NO: 5119 - DNA, 19 bp, Artificial Sequence
  Primer
tgatgaggagcgagaagag

SEQ ID NO: 5120 - DNA, 18 bp, Artificial Sequence
  Primer
tcaaagccaatccacgca

SEQ ID NO: 5121 - DNA, 20 bp, Artificial Sequence
  Primer
atgctgagtgagagctgtga

SEQ ID NO: 5122 - DNA, 20 bp, Artificial Sequence
  Primer
gtgatgaggagcgagaagag

SEQ ID NO: 5123 - DNA, 20 bp, Artificial Sequence
  Primer
aaagtcttcacaacagcctc

SEQ ID NO: 5124 - DNA, 20 bp, Artificial Sequence
  Primer
cgtcctcttcttcctcatct

SEQ ID NO: 5125 - DNA, 19 bp, Artificial Sequence
  Primer
gcatcgtcctcttcttcct

SEQ ID NO: 5126 - DNA, 19 bp, Artificial Sequence
  Primer
tcaaagccaatccacgcac

SEQ ID NO: 5127 - DNA, 19 bp, Artificial Sequence
  Primer
acaacagcctctgctacaa

SEQ ID NO: 5128 - DNA, 22 bp, Artificial Sequence
  Primer
gacatagtcaaaacccacagaa

SEQ ID NO: 5129 - DNA, 19 bp, Artificial Sequence
  Primer
tgatgaggagcgagaagag

SEQ ID NO: 5130 - DNA, 19 bp, Artificial Sequence
  Primer
tgatgaggagcgagaagag

SEQ ID NO: 5131 - DNA, 20 bp, Artificial Sequence
  Primer
ctgcaaaagcacagaaggaa

SEQ ID NO: 5132 - DNA, 18 bp, Artificial Sequence
  Primer
taaagccccactgctgaa

SEQ ID NO: 5133 - DNA, 20 bp, Artificial Sequence
  Primer
tgcaaaagcacagaaggaaa

SEQ ID NO: 5134 - DNA, 22 bp, Artificial Sequence
  Primer
atgtcagccgcaggaagaagag

SEQ ID NO: 5135 - DNA, 20 bp, Artificial Sequence
  Primer
atgtcagccgcaggaagaag

SEQ ID NO: 5136 - DNA, 21 bp, Artificial Sequence
  Primer
aatgattccagcaggcataag

SEQ ID NO: 5137 - DNA, 19 bp, Artificial Sequence
  Primer
cgcatcaacaccacagaaa

SEQ ID NO: 5138 - DNA, 20 bp, Artificial Sequence
  Primer
cgcatcaacaccacagaaaa

SEQ ID NO: 5139 - DNA, 23 bp, Artificial Sequence
  Primer
ttactactctaacagaaccctcc

SEQ ID NO: 5140 - DNA, 22 bp, Artificial Sequence
  Primer
atgtcagccgcaggaagaagag

SEQ ID NO: 5141 - DNA, 19 bp, Artificial Sequence
  Primer
aggcagcacaagtcaccaa

SEQ ID NO: 5142 - DNA, 20 bp, Artificial Sequence
  Primer
atgtcagccgcaggaagaag

SEQ ID NO: 5143 - DNA, 20 bp, Artificial Sequence
  Primer
gcatcaacaccacagaaaac

SEQ ID NO: 5144 - DNA, 21 bp, Artificial Sequence
  Primer
tctacatcaaagccaatccac

SEQ ID NO: 5145 - DNA, 21 bp, Artificial Sequence
  Primer
gcacaatacacaagcacctac

SEQ ID NO: 5146 - DNA, 19 bp, Artificial Sequence
  Primer
gctatccgcatcaacaact

SEQ ID NO: 5147 - DNA, 19 bp, Artificial Sequence
  Primer
tcaaagccaatccacgcac

SEQ ID NO: 5148 - DNA, 20 bp, Artificial Sequence
  Primer
gctacaccctttgctaactc

SEQ ID NO: 5149 - DNA, 19 bp, Artificial Sequence
  Primer
tcaatgggatcagtgccaa

SEQ ID NO: 5150 - DNA, 20 bp, Artificial Sequence
  Primer
agtttcgcctcaatccattc

SEQ ID NO: 5151 - DNA, 20 bp, Artificial Sequence
  Primer
aagccaatccacgcacgaac

SEQ ID NO: 5152 - DNA, 22 bp, Artificial Sequence
  Primer
gcagagaaagatgccaaaatga

SEQ ID NO: 5153 - DNA, 20 bp, Artificial Sequence
  Primer
atcagcagaagctccactca

SEQ ID NO: 5154 - DNA, 25 bp, Artificial Sequence
  Primer
tgtagaagcagagaaagatgccaaa

SEQ ID NO: 5155 - DNA, 25 bp, Artificial Sequence
  Primer
cccactgctgaacatcaatcataaa

SEQ ID NO: 5156 - DNA, 25 bp, Artificial Sequence
  Primer
gaagcagagaaagatgccaaaatga

SEQ ID NO: 5157 - DNA, 22 bp, Artificial Sequence
  Primer
tcttcctcttcttcttcctcaa

SEQ ID NO: 5158 - DNA, 24 bp, Artificial Sequence
  Primer
cccactgctgaacatcaatcataa

SEQ ID NO: 5159 - DNA, 19 bp, Artificial Sequence
  Primer
ccccactgctgaacatcaa

SEQ ID NO: 5160 - DNA, 22 bp, Artificial Sequence
  Primer
gccattttcctaaaaccactct

SEQ ID NO: 5161 - DNA, 22 bp, Artificial Sequence
  Primer
tcacactctatgacttccttct

SEQ ID NO: 5162 - DNA, 20 bp, Artificial Sequence
  Primer
gaagcagagaaagatgccaa

SEQ ID NO: 5163 - DNA, 21 bp, Artificial Sequence
  Primer
gaagcagagaaagatgccaaa

SEQ ID NO: 5164 - DNA, 20 bp, Artificial Sequence
  Primer
tgtccattccttgtgtgtct

SEQ ID NO: 5165 - DNA, 22 bp, Artificial Sequence
  Primer
gaagcagagaaagatgccaaaa

SEQ ID NO: 5166 - DNA, 22 bp, Artificial Sequence
  Primer
gcagagaaagatgccaaaatga

SEQ ID NO: 5167 - DNA, 23 bp, Artificial Sequence
  Primer
gtagagcatagactaaatcagcc

SEQ ID NO: 5168 - DNA, 18 bp, Artificial Sequence
  Primer
atcacgcatagcatcgca

SEQ ID NO: 5169 - DNA, 21 bp, Artificial Sequence
  Primer
ccaacataggcaaacacacag

SEQ ID NO: 5170 - DNA, 21 bp, Artificial Sequence
  Primer
tgtccattccttgtgtgtctt

SEQ ID NO: 5171 - DNA, 21 bp, Artificial Sequence
  Primer
tccattccttgtgtgtcttct

SEQ ID NO: 5172 - DNA, 23 bp, Artificial Sequence
  Primer
ccattccttgtgtgtcttctact

SEQ ID NO: 5173 - DNA, 19 bp, Artificial Sequence
  Primer
gcacccttcaactttgcct

SEQ ID NO: 5174 - DNA, 20 bp, Artificial Sequence
  Primer
gaagcagagaaagatgccaa

SEQ ID NO: 5175 - DNA, 25 bp, Artificial Sequence
  Primer
cactactgaagcagacacatctaaa

SEQ ID NO: 5176 - DNA, 24 bp, Artificial Sequence
  Primer
cactactgaagcagacacatctaa

SEQ ID NO: 5177 - DNA, 21 bp, Artificial Sequence
  Primer
gaagcagagaaagatgccaaa

SEQ ID NO: 5178 - DNA, 20 bp, Artificial Sequence
  Primer
gttttccacataagcagcca

SEQ ID NO: 5179 - DNA, 19 bp, Artificial Sequence
  Primer
tactgacactacggcagga

SEQ ID NO: 5180 - DNA, 21 bp, Artificial Sequence
  Primer
gatactgacactacggcagga

SEQ ID NO: 5181 - DNA, 19 bp, Artificial Sequence
  Primer
tactgacactacggcagga

SEQ ID NO: 5182 - DNA, 25 bp, Artificial Sequence
  Primer
gcacaagtcaccaatatggcaataa

SEQ ID NO: 5183 - DNA, 22 bp, Artificial Sequence
  Primer
gaagcagagaaagatgccaaaa

SEQ ID NO: 5184 - DNA, 22 bp, Artificial Sequence
  Primer
gcagagaaagatgccaaaatga

SEQ ID NO: 5185 - DNA, 21 bp, Artificial Sequence
  Primer
ttccacataagcagccataag

SEQ ID NO: 5186 - DNA, 19 bp, Artificial Sequence
  Primer
gcacccttcaactttgcct

SEQ ID NO: 5187 - DNA, 21 bp, Artificial Sequence
  Primer
ccaacataggcaaacacacag

SEQ ID NO: 5188 - DNA, 19 bp, Artificial Sequence
  Primer
ctttccacattccgcagac

SEQ ID NO: 5189 - DNA, 24 bp, Artificial Sequence
  Primer
gcagcctcttcaagattaaaacca

SEQ ID NO: 5190 - DNA, 19 bp, Artificial Sequence
  Primer
aacacacagcctccaaaac

SEQ ID NO: 5191 - DNA, 21 bp, Artificial Sequence
  Primer
ctacagccataacctttccac

SEQ ID NO: 5192 - DNA, 18 bp, Artificial Sequence
  Primer
accctttgctaactcgct

SEQ ID NO: 5193 - DNA, 21 bp, Artificial Sequence
  Primer
gaagcagacttagaagcagac

SEQ ID NO: 5194 - DNA, 20 bp, Artificial Sequence
  Primer
ccagaaagcaaacaagaccc

SEQ ID NO: 5195 - DNA, 20 bp, Artificial Sequence
  Primer
taccaccagccactactgaa

SEQ ID NO: 5196 - DNA, 19 bp, Artificial Sequence
  Primer
aaccagcacatccttgtcc

SEQ ID NO: 5197 - DNA, 19 bp, Artificial Sequence
  Primer
accatagtcaacgatgccc

SEQ ID NO: 5198 - DNA, 19 bp, Artificial Sequence
  Primer
caccatagtcaacgatgcc

SEQ ID NO: 5199 - DNA, 19 bp, Artificial Sequence
  Primer
acaactgtcacctgtcact

SEQ ID NO: 5200 - DNA, 20 bp, Artificial Sequence
  Primer
acgcactacattccagggca

SEQ ID NO: 5201 - DNA, 25 bp, Artificial Sequence
  Primer
cccactgctgaacatcaatcataaa

SEQ ID NO: 5202 - DNA, 24 bp, Artificial Sequence
  Primer
cccactgctgaacatcaatcataa

SEQ ID NO: 5203 - DNA, 19 bp, Artificial Sequence
  Primer
tgccttcctcatccttctc

SEQ ID NO: 5204 - DNA, 22 bp, Artificial Sequence
  Primer
catatagcagaaagacacgcaa

SEQ ID NO: 5205 - DNA, 21 bp, Artificial Sequence
  Primer
gaagcagacttagaagcagac

SEQ ID NO: 5206 - DNA, 22 bp, Artificial Sequence
  Primer
acaactacagccataacctttc

SEQ ID NO: 5207 - DNA, 20 bp, Artificial Sequence
  Primer
tgacagccctctacatcaaa

SEQ ID NO: 5208 - DNA, 20 bp, Artificial Sequence
  Primer
atgacagccctctacatcaa

SEQ ID NO: 5209 - DNA, 19 bp, Artificial Sequence
  Primer
ccccactgctgaacatcaa

SEQ ID NO: 5210 - DNA, 21 bp, Artificial Sequence
  Primer
gaagcagacttagaagcagac

SEQ ID NO: 5211 - DNA, 21 bp, Artificial Sequence
  Primer
cacaagtcaccaatatggcaa

SEQ ID NO: 5212 - DNA, 21 bp, Artificial Sequence
  Primer
acagaagcagacttagaagca

SEQ ID NO: 5213 - DNA, 19 bp, Artificial Sequence
  Primer
atgcaacagggtacacaga

SEQ ID NO: 5214 - DNA, 22 bp, Artificial Sequence
  Primer
caactacagccataacctttcc

SEQ ID NO: 5215 - DNA, 20 bp, Artificial Sequence
  Primer
gataacagcagcatacagcc

SEQ ID NO: 5216 - DNA, 22 bp, Artificial Sequence
  Primer
gcaaacacacagcctccaaaac

SEQ ID NO: 5217 - DNA, 22 bp, Artificial Sequence
  Primer
gtggcatctacaatacagacaa

SEQ ID NO: 5218 - DNA, 21 bp, Artificial Sequence
  Primer
gccataacctttccacattcc

SEQ ID NO: 5219 - DNA, 21 bp, Artificial Sequence
  Primer
agccataacctttccacattc

SEQ ID NO: 5220 - DNA, 22 bp, Artificial Sequence
  Primer
ccagtcttcctcttcttcttcc

SEQ ID NO: 5221 - DNA, 20 bp, Artificial Sequence
  Primer
acgcactacattccagggca

SEQ ID NO: 5222 - DNA, 21 bp, Artificial Sequence
  Primer
gccataacctttccacattcc

SEQ ID NO: 5223 - DNA, 20 bp, Artificial Sequence
  Primer
tagcacgaggaacccagtag

SEQ ID NO: 5224 - DNA, 21 bp, Artificial Sequence
  Primer
agccataacctttccacattc

SEQ ID NO: 5225 - DNA, 21 bp, Artificial Sequence
  Primer
gccataacctttccacattcc

SEQ ID NO: 5226 - DNA, 21 bp, Artificial Sequence
  Primer
agccataacctttccacattc

SEQ ID NO: 5227 - DNA, 25 bp, Artificial Sequence
  Primer
cccactgctgaacatcaatcataaa

SEQ ID NO: 5228 - DNA, 24 bp, Artificial Sequence
  Primer
cccactgctgaacatcaatcataa

SEQ ID NO: 5229 - DNA, 19 bp, Artificial Sequence
  Primer
ccccactgctgaacatcaa

SEQ ID NO: 5230 - DNA, 22 bp, Artificial Sequence
  Primer
ataaagtagtaggcagcacaag

SEQ ID NO: 5231 - DNA, 20 bp, Artificial Sequence
  Primer
tcgactgcaacacggacgaa

SEQ ID NO: 5232 - DNA, 21 bp, Artificial Sequence
  Primer
ctcagtccaacattttgcctc

SEQ ID NO: 5233 - DNA, 21 bp, Artificial Sequence
  Primer
gtctcagtccaacattttgcc

SEQ ID NO: 5234 - DNA, 21 bp, Artificial Sequence
  Primer
gccataacctttccacattcc

SEQ ID NO: 5235 - DNA, 22 bp, Artificial Sequence
  Primer
ggaaccatccataagcacataa

SEQ ID NO: 5236 - DNA, 21 bp, Artificial Sequence
  Primer
gccataacctttccacattcc

SEQ ID NO: 5237 - DNA, 19 bp, Artificial Sequence
  Primer
tgaagcaccaccaaaggac

SEQ ID NO: 5238 - DNA, 22 bp, Artificial Sequence
  Primer
agtcttcctcttcttcttcctc

SEQ ID NO: 5239 - DNA, 22 bp, Artificial Sequence
  Primer
ccagtcttcctcttcttcttcc

SEQ ID NO: 5240 - DNA, 19 bp, Artificial Sequence
  Primer
tgaagcaccaccaaaggac

SEQ ID NO: 5241 - DNA, 19 bp, Artificial Sequence
  Primer
gtagacagcagcaagcaca

SEQ ID NO: 5242 - DNA, 20 bp, Artificial Sequence
  Primer
acgcactacattccagggca

SEQ ID NO: 5243 - DNA, 22 bp, Artificial Sequence
  Primer
gccacatcaagcctacaataca

SEQ ID NO: 5244 - DNA, 21 bp, Artificial Sequence
  Primer
ctcagtagtatcatccagcca

SEQ ID NO: 5245 - DNA, 20 bp, Artificial Sequence
  Primer
caactgtcacctgtcacttc

SEQ ID NO: 5246 - DNA, 19 bp, Artificial Sequence
  Primer
aagccacatcaagcctaca

SEQ ID NO: 5247 - DNA, 19 bp, Artificial Sequence
  Primer
cagccactactgaagcaga

SEQ ID NO: 5248 - DNA, 20 bp, Artificial Sequence
  Primer
cacttccaacaaagccaaca

SEQ ID NO: 5249 - DNA, 18 bp, Artificial Sequence
  Primer
gcacttccaacaaagcca

SEQ ID NO: 5250 - DNA, 24 bp, Artificial Sequence
  Primer
cactactgaagcagacacatctaa

SEQ ID NO: 5251 - DNA, 25 bp, Artificial Sequence
  Primer
cactactgaagcagacacatctaaa

SEQ ID NO: 5252 - DNA, 22 bp, Artificial Sequence
  Primer
actactctaacagaaccctcca

SEQ ID NO: 5253 - DNA, 20 bp, Artificial Sequence
  Primer
acctccaatacccaacaact

SEQ ID NO: 5254 - DNA, 19 bp, Artificial Sequence
  Primer
agcatttcctcgcacaacc

SEQ ID NO: 5255 - DNA, 19 bp, Artificial Sequence
  Primer
gccagtaaaccaggagaca

SEQ ID NO: 5256 - DNA, 22 bp, Artificial Sequence
  Primer
agttttcttcaccagcatcatc

SEQ ID NO: 5257 - DNA, 20 bp, Artificial Sequence
  Primer
acctccaatacccaacaact

SEQ ID NO: 5258 - DNA, 23 bp, Artificial Sequence
  Primer
gacagcagcaagcacaaaacaag

SEQ ID NO: 5259 - DNA, 19 bp, Artificial Sequence
  Primer
agcatttcctcgcacaacc

SEQ ID NO: 5260 - DNA, 21 bp, Artificial Sequence
  Primer
actgtcacctgtcacttctaa

SEQ ID NO: 5261 - DNA, 24 bp, Artificial Sequence
  Primer
agccacatcaagcctacaatacaa

SEQ ID NO: 5262 - DNA, 20 bp, Artificial Sequence
  Primer
gtagccagtaaaccaggaga

SEQ ID NO: 5263 - DNA, 20 bp, Artificial Sequence
  Primer
tgtagccagtaaaccaggag

SEQ ID NO: 5264 - DNA, 21 bp, Artificial Sequence
  Primer
acctccaatacccaacaactt

SEQ ID NO: 5265 - DNA, 19 bp, Artificial Sequence
  Primer
agcaatgaagccgagccaa

SEQ ID NO: 5266 - DNA, 20 bp, Artificial Sequence
  Primer
gcaaaagcacagaaggaaag

SEQ ID NO: 5267 - DNA, 21 bp, Artificial Sequence
  Primer
cataatcagggacaacaacca

SEQ ID NO: 5268 - DNA, 18 bp, Artificial Sequence
  Primer
caatgaagccgagccaaa

SEQ ID NO: 5269 - DNA, 20 bp, Artificial Sequence
  Primer
gataacagcagcatacagcc

SEQ ID NO: 5270 - DNA, 22 bp, Artificial Sequence
  Primer
gctcagagtcatcctcatcaaa

SEQ ID NO: 5271 - DNA, 21 bp, Artificial Sequence
  Primer
gctcagagtcatcctcatcaa

SEQ ID NO: 5272 - DNA, 21 bp, Artificial Sequence
  Primer
aagaatcggacaccatagtca

SEQ ID NO: 5273 - DNA, 23 bp, Artificial Sequence
  Primer
gccacatcaagcctacaatacaa

SEQ ID NO: 5274 - DNA, 22 bp, Artificial Sequence
  Primer
ctaagccacatcaagcctacaa

SEQ ID NO: 5275 - DNA, 21 bp, Artificial Sequence
  Primer
agaatcggacaccatagtcaa

SEQ ID NO: 5276 - DNA, 18 bp, Artificial Sequence
  Primer
caatgaagccgagccaaa

SEQ ID NO: 5277 - DNA, 20 bp, Artificial Sequence
  Primer
tgcaaaagcacagaaggaaa

SEQ ID NO: 5278 - DNA, 22 bp, Artificial Sequence
  Primer
gctcagagtcatcctcatcaaa

SEQ ID NO: 5279 - DNA, 21 bp, Artificial Sequence
  Primer
gctcagagtcatcctcatcaa

SEQ ID NO: 5280 - DNA, 18 bp, Artificial Sequence
  Primer
tagcagccaacataggca

SEQ ID NO: 5281 - DNA, 19 bp, Artificial Sequence
  Primer
agcaagaaccacaagagca

SEQ ID NO: 5282 - DNA, 19 bp, Artificial Sequence
  Primer
cgcaagtgaccacgaatga

SEQ ID NO: 5283 - DNA, 21 bp, Artificial Sequence
  Primer
ccaaaaaggcacaataggaga

SEQ ID NO: 5284 - DNA, 18 bp, Artificial Sequence
  Primer
accctttgctaactcgct

SEQ ID NO: 5285 - DNA, 22 bp, Artificial Sequence
  Primer
agagcatagactaaatcagcca

SEQ ID NO: 5286 - DNA, 18 bp, Artificial Sequence
  Primer
agcagccaacataggcaa

SEQ ID NO: 5287 - DNA, 21 bp, Artificial Sequence
  Primer
gcccaaaagattagacaacca

SEQ ID NO: 5288 - DNA, 19 bp, Artificial Sequence
  Primer
gctatccgcatcaacaact

SEQ ID NO: 5289 - DNA, 21 bp, Artificial Sequence
  Primer
gcccaaaagattagacaacca

SEQ ID NO: 5290 - DNA, 19 bp, Artificial Sequence
  Primer
cagccaacataggcaaaca

SEQ ID NO: 5291 - DNA, 21 bp, Artificial Sequence
  Primer
agtttcgcctcaatccattca

SEQ ID NO: 5292 - DNA, 19 bp, Artificial Sequence
  Primer
gccaacataggcaaacaca

SEQ ID NO: 5293 - DNA, 21 bp, Artificial Sequence
  Primer
aagaatcggacaccatagtca

SEQ ID NO: 5294 - DNA, 19 bp, Artificial Sequence
  Primer
gacgaacacgactctgtct

SEQ ID NO: 5295 - DNA, 21 bp, Artificial Sequence
  Primer
agaatcggacaccatagtcaa

SEQ ID NO: 5296 - DNA, 19 bp, Artificial Sequence
  Primer
gccctctacatcaaagcca

SEQ ID NO: 5297 - DNA, 20 bp, Artificial Sequence
  Primer
gccctctacatcaaagccaa

SEQ ID NO: 5298 - DNA, 21 bp, Artificial Sequence
  Primer
ggcacactgataaacaccaga

SEQ ID NO: 5299 - DNA, 20 bp, Artificial Sequence
  Primer
tcaatagccagtgacacgaa

SEQ ID NO: 5300 - DNA, 21 bp, Artificial Sequence
  Primer
ccatcttacctttcggtcaca

SEQ ID NO: 5301 - DNA, 20 bp, Artificial Sequence
  Primer
gccctctacatcaaagccaa

SEQ ID NO: 5302 - DNA, 18 bp, Artificial Sequence
  Primer
tgcctgaaatgtcgccaa

SEQ ID NO: 5303 - DNA, 18 bp, Artificial Sequence
  Primer
aatgcctgaaatgtcgcc

SEQ ID NO: 5304 - DNA, 20 bp, Artificial Sequence
  Primer
tccatcttacctttcggtca

SEQ ID NO: 5305 - DNA, 21 bp, Artificial Sequence
  Primer
acctccaatacccaacaactt

SEQ ID NO: 5306 - DNA, 21 bp, Artificial Sequence
  Primer
ggctcccttattaccgttctt

SEQ ID NO: 5307 - DNA, 20 bp, Artificial Sequence
  Primer
gcgtaaaactcatccacgaa

SEQ ID NO: 5308 - DNA, 21 bp, Artificial Sequence
  Primer
gtcagtctcagtccaacattt

SEQ ID NO: 5309 - DNA, 21 bp, Artificial Sequence
  Primer
cccagcaccatacctctattt

SEQ ID NO: 5310 - DNA, 19 bp, Artificial Sequence
  Primer
ccccactgctgaacatcaa

SEQ ID NO: 5311 - DNA, 24 bp, Artificial Sequence
  Primer
cccactgctgaacatcaatcataa

SEQ ID NO: 5312 - DNA, 20 bp, Artificial Sequence
  Primer
atgacagccctctacatcaa

SEQ ID NO: 5313 - DNA, 20 bp, Artificial Sequence
  Primer
tgacagccctctacatcaaa

SEQ ID NO: 5314 - DNA, 19 bp, Artificial Sequence
  Primer
gccgagccaaacataccaa

SEQ ID NO: 5315 - DNA, 21 bp, Artificial Sequence
  Primer
ggcacactgataaacaccaga

SEQ ID NO: 5316 - DNA, 21 bp, Artificial Sequence
  Primer
gcaaacacacagcctccaaaa

SEQ ID NO: 5317 - DNA, 20 bp, Artificial Sequence
  Primer
gcaaacacacagcctccaaa

SEQ ID NO: 5318 - DNA, 19 bp, Artificial Sequence
  Primer
gcaaacacacagcctccaa

SEQ ID NO: 5319 - DNA, 19 bp, Artificial Sequence
  Primer
gccctttccacaaaagtca

SEQ ID NO: 5320 - DNA, 25 bp, Artificial Sequence
  Primer
cccactgctgaacatcaatcataaa

SEQ ID NO: 5321 - DNA, 20 bp, Artificial Sequence
  Primer
tccaacaaagccaacatctc

SEQ ID NO: 5322 - DNA, 19 bp, Artificial Sequence
  Primer
accaccagccactactgaa

SEQ ID NO: 5323 - DNA, 22 bp, Artificial Sequence
  Primer
ataaagtagtaggcagcacaag

SEQ ID NO: 5324 - DNA, 23 bp, Artificial Sequence
  Primer
gtgggaaggacataaggtggtag

SEQ ID NO: 5325 - DNA, 22 bp, Artificial Sequence
  Primer
ccttccactctaccatcaaaca

SEQ ID NO: 5326 - DNA, 21 bp, Artificial Sequence
  Primer
ctcagtagtatcatccagcca

SEQ ID NO: 5327 - DNA, 21 bp, Artificial Sequence
  Primer
agtagtatcatccagccagtc

SEQ ID NO: 5328 - DNA, 21 bp, Artificial Sequence
  Primer
ctcagtagtatcatccagcca

SEQ ID NO: 5329 - DNA, 23 bp, Artificial Sequence
  Primer
gtgggaaggacataaggtggtag

SEQ ID NO: 5330 - DNA, 20 bp, Artificial Sequence
  Primer
gctacaccctttgctaactc

SEQ ID NO: 5331 - DNA, 21 bp, Artificial Sequence
  Primer
agtagtatcatccagccagtc

SEQ ID NO: 5332 - DNA, 25 bp, Artificial Sequence
  Primer
cactactgaagcagacacatctaaa

SEQ ID NO: 5333 - DNA, 24 bp, Artificial Sequence
  Primer
cactactgaagcagacacatctaa

SEQ ID NO: 5334 - DNA, 24 bp, Artificial Sequence
  Primer
cactactgaagcagacacatctaa

SEQ ID NO: 5335 - DNA, 25 bp, Artificial Sequence
  Primer
cactactgaagcagacacatctaaa

SEQ ID NO: 5336 - DNA, 19 bp, Artificial Sequence
  Primer
cagccactactgaagcaga

SEQ ID NO: 5337 - DNA, 19 bp, Artificial Sequence
  Primer
accaccagccactactgaa

SEQ ID NO: 5338 - DNA, 22 bp, Artificial Sequence
  Primer
cgacatcacaatttcctgagac

SEQ ID NO: 5339 - DNA, 19 bp, Artificial Sequence
  Primer
aagagccagccaaagaaac

SEQ ID NO: 5340 - DNA, 22 bp, Artificial Sequence
  Primer
ataaagtagtaggcagcacaag

SEQ ID NO: 5341 - DNA, 20 bp, Artificial Sequence
  Primer
ttacatagcccatctgcctt

SEQ ID NO: 5342 - DNA, 20 bp, Artificial Sequence
  Primer
cgtcaccttcagtaacgaca

SEQ ID NO: 5343 - DNA, 24 bp, Artificial Sequence
  Primer
gccaataacgacatcacaatttcc

SEQ ID NO: 5344 - DNA, 21 bp, Artificial Sequence
  Primer
ctaacagaaccctccaggtaa

SEQ ID NO: 5345 - DNA, 22 bp, Artificial Sequence
  Primer
gcagatgggtaatagagagcaa

SEQ ID NO: 5346 - DNA, 18 bp, Artificial Sequence
  Primer
gcaagtccgatggcaaaa

SEQ ID NO: 5347 - DNA, 18 bp, Artificial Sequence
  Primer
agcaagtccgatggcaaa

SEQ ID NO: 5348 - DNA, 19 bp, Artificial Sequence
  Primer
agagcaagtccgatggcaa

SEQ ID NO: 5349 - DNA, 20 bp, Artificial Sequence
  Primer
ccaaatatgcctgctgacaa

SEQ ID NO: 5350 - DNA, 18 bp, Artificial Sequence
  Primer
gcaagtccgatggcaaaa

SEQ ID NO: 5351 - DNA, 18 bp, Artificial Sequence
  Primer
agcaagtccgatggcaaa

SEQ ID NO: 5352 - DNA, 24 bp, Artificial Sequence
  Primer
gccaataacgacatcacaatttcc

SEQ ID NO: 5353 - DNA, 19 bp, Artificial Sequence
  Primer
agagcaagtccgatggcaa

SEQ ID NO: 5354 - DNA, 22 bp, Artificial Sequence
  Primer
cgacatcacaatttcctgagac

SEQ ID NO: 5355 - DNA, 22 bp, Artificial Sequence
  Primer
gatgccaataacgacatcacaa

SEQ ID NO: 5356 - DNA, 22 bp, Artificial Sequence
  Primer
caaatatgcctgctgacaacaa

SEQ ID NO: 5357 - DNA, 20 bp, Artificial Sequence
  Primer
gcaccaaatatgcctgctga

SEQ ID NO: 5358 - DNA, 20 bp, Artificial Sequence
  Primer
atcagcagaagctccactca

SEQ ID NO: 5359 - DNA, 18 bp, Artificial Sequence
  Primer
agcaagaacgcaagcaga

SEQ ID NO: 5360 - DNA, 24 bp, Artificial Sequence
  Primer
gccaataacgacatcacaatttcc

SEQ ID NO: 5361 - DNA, 20 bp, Artificial Sequence
  Primer
atcagcagaagctccactca

SEQ ID NO: 5362 - DNA, 20 bp, Artificial Sequence
  Primer
atcagcagaagctccactca

SEQ ID NO: 5363 - DNA, 19 bp, Artificial Sequence
  Primer
gcacccttcaactttgcct

SEQ ID NO: 5364 - DNA, 19 bp, Artificial Sequence
  Primer
ttagcagcatcaccagcac

SEQ ID NO: 5365 - DNA, 22 bp, Artificial Sequence
  Primer
cgacatcacaatttcctgagac

SEQ ID NO: 5366 - DNA, 20 bp, Artificial Sequence
  Primer
gtttacatagcccatctgcc

SEQ ID NO: 5367 - DNA, 20 bp, Artificial Sequence
  Primer
ttacatagcccatctgcctt

SEQ ID NO: 5368 - DNA, 20 bp, Artificial Sequence
  Primer
atcagcagaagctccactca

SEQ ID NO: 5369 - DNA, 19 bp, Artificial Sequence
  Primer
ctaatacaggcaccgcaac

SEQ ID NO: 5370 - DNA, 22 bp, Artificial Sequence
  Primer
gatgccaataacgacatcacaa

SEQ ID NO: 5371 - DNA, 25 bp, Artificial Sequence
  Primer
ccatcaaacaagacagtaagtgaag

SEQ ID NO: 5372 - DNA, 20 bp, Artificial Sequence
  Primer
gcaataataccaccagccac

SEQ ID NO: 5373 - DNA, 21 bp, Artificial Sequence
  Primer
gcacaatacacaagcacctac

SEQ ID NO: 5374 - DNA, 25 bp, Artificial Sequence
  Primer
gccaataacgacatcacaatttcct

SEQ ID NO: 5375 - DNA, 22 bp, Artificial Sequence
  Primer
caataataccaccagccactac

SEQ ID NO: 5376 - DNA, 19 bp, Artificial Sequence
  Primer
tacacaagcacctacagcc

SEQ ID NO: 5377 - DNA, 22 bp, Artificial Sequence
  Primer
gcacaatacacaagcacctaca

SEQ ID NO: 5378 - DNA, 21 bp, Artificial Sequence
  Primer
tgttgaacctcctcttgtctg

SEQ ID NO: 5379 - DNA, 19 bp, Artificial Sequence
  Primer
atacaggcaccgcaacgaa

SEQ ID NO: 5380 - DNA, 19 bp, Artificial Sequence
  Primer
taccaccagccactactga

SEQ ID NO: 5381 - DNA, 20 bp, Artificial Sequence
  Primer
acacatctaaagcacccaca

SEQ ID NO: 5382 - DNA, 19 bp, Artificial Sequence
  Primer
catcgcatcaacaccacag

SEQ ID NO: 5383 - DNA, 22 bp, Artificial Sequence
  Primer
aaacaagaccctcctactgtaa

SEQ ID NO: 5384 - DNA, 20 bp, Artificial Sequence
  Primer
gcatcaacaccacagaaaac

SEQ ID NO: 5385 - DNA, 19 bp, Artificial Sequence
  Primer
ccccactgctgaacatcaa

SEQ ID NO: 5386 - DNA, 20 bp, Artificial Sequence
  Primer
agattcatcgcatcaacacc

SEQ ID NO: 5387 - DNA, 20 bp, Artificial Sequence
  Primer
atgacagccctctacatcaa

SEQ ID NO: 5388 - DNA, 20 bp, Artificial Sequence
  Primer
tgacagccctctacatcaaa

SEQ ID NO: 5389 - DNA, 19 bp, Artificial Sequence
  Primer
acccatacgatgccttctt

SEQ ID NO: 5390 - DNA, 23 bp, Artificial Sequence
  Primer
ttactactctaacagaaccctcc

SEQ ID NO: 5391 - DNA, 19 bp, Artificial Sequence
  Primer
tacacaaagcagcctcctc

SEQ ID NO: 5392 - DNA, 25 bp, Artificial Sequence
  Primer
cagaaagcaaacaagaccctcctac

SEQ ID NO: 5393 - DNA, 19 bp, Artificial Sequence
  Primer
atgtcagccgcaggaagaa

SEQ ID NO: 5394 - DNA, 24 bp, Artificial Sequence
  Primer
gccaataacgacatcacaatttcc

SEQ ID NO: 5395 - DNA, 20 bp, Artificial Sequence
  Primer
ccaaatatgcctgctgacaa

SEQ ID NO: 5396 - DNA, 22 bp, Artificial Sequence
  Primer
cgacatcacaatttcctgagac

SEQ ID NO: 5397 - DNA, 19 bp, Artificial Sequence
  Primer
atgtcagccgcaggaagaa

SEQ ID NO: 5398 - DNA, 22 bp, Artificial Sequence
  Primer
gatgccaataacgacatcacaa

SEQ ID NO: 5399 - DNA, 19 bp, Artificial Sequence
  Primer
atgtcagccgcaggaagaa

SEQ ID NO: 5400 - DNA, 19 bp, Artificial Sequence
  Primer
ttcatcgcatcaacaccac

SEQ ID NO: 5401 - DNA, 20 bp, Artificial Sequence
  Primer
acagcatcaccatagtcacc

SEQ ID NO: 5402 - DNA, 20 bp, Artificial Sequence
  Primer
agccgcaggaagaagagtca

SEQ ID NO: 5403 - DNA, 19 bp, Artificial Sequence
  Primer
atgtcagccgcaggaagaa

SEQ ID NO: 5404 - DNA, 19 bp, Artificial Sequence
  Primer
atgtcagccgcaggaagaa

SEQ ID NO: 5405 - DNA, 19 bp, Artificial Sequence
  Primer
cgcaggaagaagagtcaca

SEQ ID NO: 5406 - DNA, 22 bp, Artificial Sequence
  Primer
caaatatgcctgctgacaacaa

SEQ ID NO: 5407 - DNA, 20 bp, Artificial Sequence
  Primer
gcaccaaatatgcctgctga

SEQ ID NO: 5408 - DNA, 20 bp, Artificial Sequence
  Primer
atgtcagccgcaggaagaag

SEQ ID NO: 5409 - DNA, 20 bp, Artificial Sequence
  Primer
atcagcagaagctccactca

SEQ ID NO: 5410 - DNA, 20 bp, Artificial Sequence
  Primer
cgcaggaagaagagtcacag

SEQ ID NO: 5411 - DNA, 21 bp, Artificial Sequence
  Primer
cgtttacatagcccatctgcc

SEQ ID NO: 5412 - DNA, 20 bp, Artificial Sequence
  Primer
gcaccaaatatgcctgctga

SEQ ID NO: 5413 - DNA, 22 bp, Artificial Sequence
  Primer
caaatatgcctgctgacaacaa

SEQ ID NO: 5414 - DNA, 20 bp, Artificial Sequence
  Primer
ccaaatatgcctgctgacaa

SEQ ID NO: 5415 - DNA, 20 bp, Artificial Sequence
  Primer
atgtcagccgcaggaagaag

SEQ ID NO: 5416 - DNA, 20 bp, Artificial Sequence
  Primer
gaaagcaaacaagaccctcc

SEQ ID NO: 5417 - DNA, 20 bp, Artificial Sequence
  Primer
cgcaggaagaagagtcacag

SEQ ID NO: 5418 - DNA, 25 bp, Artificial Sequence
  Primer
gccaataacgacatcacaatttcct

SEQ ID NO: 5419 - DNA, 20 bp, Artificial Sequence
  Primer
gcaccaaatatgcctgctga

SEQ ID NO: 5420 - DNA, 24 bp, Artificial Sequence
  Primer
cccactgctgaacatcaatcataa

SEQ ID NO: 5421 - DNA, 20 bp, Artificial Sequence
  Primer
gcaccaaatatgcctgctga

SEQ ID NO: 5422 - DNA, 25 bp, Artificial Sequence
  Primer
cccactgctgaacatcaatcataaa

SEQ ID NO: 5423 - DNA, 20 bp, Artificial Sequence
  Primer
cgcaggaagaagagtcacag

SEQ ID NO: 5424 - DNA, 20 bp, Artificial Sequence
  Primer
gcaccaaatatgcctgctga

SEQ ID NO: 5425 - DNA, 19 bp, Artificial Sequence
  Primer
catcgcatcaacaccacag

SEQ ID NO: 5426 - DNA, 20 bp, Artificial Sequence
  Primer
atgtcagccgcaggaagaag

SEQ ID NO: 5427 - DNA, 20 bp, Artificial Sequence
  Primer
agcaaacaagaccctcctac

SEQ ID NO: 5428 - DNA, 20 bp, Artificial Sequence
  Primer
atgtcagccgcaggaagaag

SEQ ID NO: 5429 - DNA, 20 bp, Artificial Sequence
  Primer
cgcaggaagaagagtcacag

SEQ ID NO: 5430 - DNA, 20 bp, Artificial Sequence
  Primer
gaaagcaaacaagaccctcc

SEQ ID NO: 5431 - DNA, 20 bp, Artificial Sequence
  Primer
tcaacaccacagaaaactcc

SEQ ID NO: 5432 - DNA, 20 bp, Artificial Sequence
  Primer
cgcaggaagaagagtcacag

SEQ ID NO: 5433 - DNA, 22 bp, Artificial Sequence
  Primer
actactctaacagaaccctcca

SEQ ID NO: 5434 - DNA, 20 bp, Artificial Sequence
  Primer
atgtcagccgcaggaagaag

SEQ ID NO: 5435 - DNA, 19 bp, Artificial Sequence
  Primer
caagttaggcatcgcaaca

SEQ ID NO: 5436 - DNA, 20 bp, Artificial Sequence
  Primer
agcatcaccatagtcacctt

SEQ ID NO: 5437 - DNA, 20 bp, Artificial Sequence
  Primer
gcaataataccaccagccac

SEQ ID NO: 5438 - DNA, 21 bp, Artificial Sequence
  Primer
cacaacagcatcaccatagtc

SEQ ID NO: 5439 - DNA, 21 bp, Artificial Sequence
  Primer
tcagtagtatcatccagccag

SEQ ID NO: 5440 - DNA, 20 bp, Artificial Sequence
  Primer
gcaccaaatatgcctgctga

SEQ ID NO: 5441 - DNA, 20 bp, Artificial Sequence
  Primer
cgcaggaagaagagtcacag

SEQ ID NO: 5442 - DNA, 20 bp, Artificial Sequence
  Primer
atgtcagccgcaggaagaag

SEQ ID NO: 5443 - DNA, 20 bp, Artificial Sequence
  Primer
ccagaaagcaaacaagaccc

SEQ ID NO: 5444 - DNA, 20 bp, Artificial Sequence
  Primer
acagcatcaccatagtcacc

SEQ ID NO: 5445 - DNA, 24 bp, Artificial Sequence
  Primer
gccaataacgacatcacaatttcc

SEQ ID NO: 5446 - DNA, 21 bp, Artificial Sequence
  Primer
acacggtaaccagtaaagaca

SEQ ID NO: 5447 - DNA, 20 bp, Artificial Sequence
  Primer
atgtcagccgcaggaagaag

SEQ ID NO: 5448 - DNA, 20 bp, Artificial Sequence
  Primer
cgcaggaagaagagtcacag

SEQ ID NO: 5449 - DNA, 25 bp, Artificial Sequence
  Primer
gcttattcacatacaaactaccacc

SEQ ID NO: 5450 - DNA, 19 bp, Artificial Sequence
  Primer
aacccatacgatgccttct

SEQ ID NO: 5451 - DNA, 22 bp, Artificial Sequence
  Primer
ccgatggcaaaatgactcttac

SEQ ID NO: 5452 - DNA, 20 bp, Artificial Sequence
  Primer
atcagcagaagctccactca

SEQ ID NO: 5453 - DNA, 19 bp, Artificial Sequence
  Primer
cgcaggaagaagagtcaca

SEQ ID NO: 5454 - DNA, 19 bp, Artificial Sequence
  Primer
atgtcagccgcaggaagaa

SEQ ID NO: 5455 - DNA, 20 bp, Artificial Sequence
  Primer
agccgcaggaagaagagtca

SEQ ID NO: 5456 - DNA, 20 bp, Artificial Sequence
  Primer
tccagaaagcaaacaagacc

SEQ ID NO: 5457 - DNA, 20 bp, Artificial Sequence
  Primer
cgcaggaagaagagtcacag

SEQ ID NO: 5458 - DNA, 19 bp, Artificial Sequence
  Primer
cgcaggaagaagagtcaca

SEQ ID NO: 5459 - DNA, 20 bp, Artificial Sequence
  Primer
aaactaccaccatcacagcc

SEQ ID NO: 5460 - DNA, 20 bp, Artificial Sequence
  Primer
ccaaatatgcctgctgacaa

SEQ ID NO: 5461 - DNA, 20 bp, Artificial Sequence
  Primer
agcaaacaagaccctcctac

SEQ ID NO: 5462 - DNA, 25 bp, Artificial Sequence
  Primer
gccaataacgacatcacaatttcct

SEQ ID NO: 5463 - DNA, 22 bp, Artificial Sequence
  Primer
caaatatgcctgctgacaacaa

SEQ ID NO: 5464 - DNA, 22 bp, Artificial Sequence
  Primer
catacaaactaccaccatcaca

SEQ ID NO: 5465 - DNA, 20 bp, Artificial Sequence
  Primer
gaaagcaaacaagaccctcc

SEQ ID NO: 5466 - DNA, 25 bp, Artificial Sequence
  Primer
gcttattcacatacaaactaccacc

SEQ ID NO: 5467 - DNA, 22 bp, Artificial Sequence
  Primer
cacatacaaactaccaccatca

SEQ ID NO: 5468 - DNA, 22 bp, Artificial Sequence
  Primer
catacaaactaccaccatcaca

SEQ ID NO: 5469 - DNA, 25 bp, Artificial Sequence
  Primer
gcttattcacatacaaactaccacc

SEQ ID NO: 5470 - DNA, 22 bp, Artificial Sequence
  Primer
gtcagtctcagtccaacatttt

SEQ ID NO: 5471 - DNA, 20 bp, Artificial Sequence
  Primer
gtttacatagcccatctgcc

SEQ ID NO: 5472 - DNA, 22 bp, Artificial Sequence
  Primer
cacatacaaactaccaccatca

SEQ ID NO: 5473 - DNA, 21 bp, Artificial Sequence
  Primer
agtagtatcatccagccagtc

SEQ ID NO: 5474 - DNA, 22 bp, Artificial Sequence
  Primer
catacaaactaccaccatcaca

SEQ ID NO: 5475 - DNA, 25 bp, Artificial Sequence
  Primer
gcttattcacatacaaactaccacc

SEQ ID NO: 5476 - DNA, 22 bp, Artificial Sequence
  Primer
cacatacaaactaccaccatca

SEQ ID NO: 5477 - DNA, 22 bp, Artificial Sequence
  Primer
catacaaactaccaccatcaca

SEQ ID NO: 5478 - DNA, 19 bp, Artificial Sequence
  Primer
gtgatgaggagcgagaaga

SEQ ID NO: 5479 - DNA, 21 bp, Artificial Sequence
  Primer
cgtttacatagcccatctgcc

SEQ ID NO: 5480 - DNA, 19 bp, Artificial Sequence
  Primer
acaactgtcacctgtcact

SEQ ID NO: 5481 - DNA, 20 bp, Artificial Sequence
  Primer
gcaccaaatatgcctgctga

SEQ ID NO: 5482 - DNA, 19 bp, Artificial Sequence
  Primer
atgtcagccgcaggaagaa

SEQ ID NO: 5483 - DNA, 20 bp, Artificial Sequence
  Primer
gcaccaaatatgcctgctga

SEQ ID NO: 5484 - DNA, 21 bp, Artificial Sequence
  Primer
ctaacagaaccctccaggtaa

SEQ ID NO: 5485 - DNA, 19 bp, Artificial Sequence
  Primer
agaggtggcaacactgtaa

SEQ ID NO: 5486 - DNA, 20 bp, Artificial Sequence
  Primer
ccagaaagcaaacaagaccc

SEQ ID NO: 5487 - DNA, 22 bp, Artificial Sequence
  Primer
acagcatcaccatagtcacctt

SEQ ID NO: 5488 - DNA, 23 bp, Artificial Sequence
  Primer
ttactactctaacagaaccctcc

SEQ ID NO: 5489 - DNA, 20 bp, Artificial Sequence
  Primer
gacacatctaaagcacccac

SEQ ID NO: 5490 - DNA, 20 bp, Artificial Sequence
  Primer
agattcatcgcatcaacacc

SEQ ID NO: 5491 - DNA, 20 bp, Artificial Sequence
  Primer
cagacacatctaaagcaccc

SEQ ID NO: 5492 - DNA, 19 bp, Artificial Sequence
  Primer
agaggtggcaacactgtaa

SEQ ID NO: 5493 - DNA, 19 bp, Artificial Sequence
  Primer
gtgatgaggagcgagaaga

SEQ ID NO: 5494 - DNA, 20 bp, Artificial Sequence
  Primer
acacatctaaagcacccaca

SEQ ID NO: 5495 - DNA, 20 bp, Artificial Sequence
  Primer
cgcaggaagaagagtcacag

SEQ ID NO: 5496 - DNA, 19 bp, Artificial Sequence
  Primer
caagttaggcatcgcaaca

SEQ ID NO: 5497 - DNA, 18 bp, Artificial Sequence
  Primer
catcgcatcaacaccaca

SEQ ID NO: 5498 - DNA, 19 bp, Artificial Sequence
  Primer
caagttaggcatcgcaaca

SEQ ID NO: 5499 - DNA, 20 bp, Artificial Sequence
  Primer
gaaagcaaacaagaccctcc

SEQ ID NO: 5500 - DNA, 20 bp, Artificial Sequence
  Primer
gcaagcagaattaaccctca

SEQ ID NO: 5501 - DNA, 20 bp, Artificial Sequence
  Primer
cgcaggaagaagagtcacag

SEQ ID NO: 5502 - DNA, 21 bp, Artificial Sequence
  Primer
gtccttccactctaccatcaa

SEQ ID NO: 5503 - DNA, 20 bp, Artificial Sequence
  Primer
agcaaacaagaccctcctac

SEQ ID NO: 5504 - DNA, 23 bp, Artificial Sequence
  Primer
caaacaagaccctcctactgtaa

SEQ ID NO: 5505 - DNA, 20 bp, Artificial Sequence
  Primer
tgtccttccactctaccatc

SEQ ID NO: 5506 - DNA, 21 bp, Artificial Sequence
  Primer
acacggtaaccagtaaagaca

SEQ ID NO: 5507 - DNA, 20 bp, Artificial Sequence
  Primer
tccagaaagcaaacaagacc

SEQ ID NO: 5508 - DNA, 19 bp, Artificial Sequence
  Primer
gcaaacagcaccacctaaa

SEQ ID NO: 5509 - DNA, 20 bp, Artificial Sequence
  Primer
gcagacacatctaaagcacc

SEQ ID NO: 5510 - DNA, 20 bp, Artificial Sequence
  Primer
ccagaaagcaaacaagaccc

SEQ ID NO: 5511 - DNA, 20 bp, Artificial Sequence
  Primer
gtctacctgtccttccactc

SEQ ID NO: 5512 - DNA, 22 bp, Artificial Sequence
  Primer
acagcatcaccatagtcacctt

SEQ ID NO: 5513 - DNA, 20 bp, Artificial Sequence
  Primer
agcagacacatctaaagcac

SEQ ID NO: 5514 - DNA, 20 bp, Artificial Sequence
  Primer
aacctctccaaaaggacaca

SEQ ID NO: 5515 - DNA, 20 bp, Artificial Sequence
  Primer
ttacatagcccatctgcctt

SEQ ID NO: 5516 - DNA, 20 bp, Artificial Sequence
  Primer
aacctctccaaaaggacaca

SEQ ID NO: 5517 - DNA, 21 bp, Artificial Sequence
  Primer
tttacatagcccatctgcctt

SEQ ID NO: 5518 - DNA, 20 bp, Artificial Sequence
  Primer
gcaagcagaattaaccctca

SEQ ID NO: 5519 - DNA, 24 bp, Artificial Sequence
  Primer
gaataggaagacaactggatagga

SEQ ID NO: 5520 - DNA, 20 bp, Artificial Sequence
  Primer
ttacatagcccatctgcctt

SEQ ID NO: 5521 - DNA, 22 bp, Artificial Sequence
  Primer
agtgaataggaagacaactgga

SEQ ID NO: 5522 - DNA, 21 bp, Artificial Sequence
  Primer
cgtttacatagcccatctgcc

SEQ ID NO: 5523 - DNA, 22 bp, Artificial Sequence
  Primer
catcaacaccacagaaaactcc

SEQ ID NO: 5524 - DNA, 20 bp, Artificial Sequence
  Primer
attcatcgcatcaacaccac

SEQ ID NO: 5525 - DNA, 20 bp, Artificial Sequence
  Primer
ttacatagcccatctgcctt

SEQ ID NO: 5526 - DNA, 20 bp, Artificial Sequence
  Primer
gcaccaaatatgcctgctga

SEQ ID NO: 5527 - DNA, 18 bp, Artificial Sequence
  Primer
tgtgactccattgacgct

SEQ ID NO: 5528 - DNA, 22 bp, Artificial Sequence
  Primer
tcataaagtagtaggcagcaca

SEQ ID NO: 5529 - DNA, 21 bp, Artificial Sequence
  Primer
tctacctgtccttccactcta

SEQ ID NO: 5530 - DNA, 19 bp, Artificial Sequence
  Primer
gaagccgagccaaacatac

SEQ ID NO: 5531 - DNA, 22 bp, Artificial Sequence
  Primer
caagaataccacgaaagcaaga

SEQ ID NO: 5532 - DNA, 21 bp, Artificial Sequence
  Primer
actacagccataacctttcca

SEQ ID NO: 5533 - DNA, 22 bp, Artificial Sequence
  Primer
caactacagccataacctttcc

SEQ ID NO: 5534 - DNA, 20 bp, Artificial Sequence
  Primer
gaaagcaaacaagaccctcc

SEQ ID NO: 5535 - DNA, 19 bp, Artificial Sequence
  Primer
tcaaagccaatccacgcac

SEQ ID NO: 5536 - DNA, 18 bp, Artificial Sequence
  Primer
tcagcagcaagaacgcaa

SEQ ID NO: 5537 - DNA, 20 bp, Artificial Sequence
  Primer
gtttacatagcccatctgcc

SEQ ID NO: 5538 - DNA, 20 bp, Artificial Sequence
  Primer
ctgtccttccactctaccat

SEQ ID NO: 5539 - DNA, 22 bp, Artificial Sequence
  Primer
gcaagaataccacgaaagcaag

SEQ ID NO: 5540 - DNA, 18 bp, Artificial Sequence
  Primer
atgccagccaccgtaaaa

SEQ ID NO: 5541 - DNA, 20 bp, Artificial Sequence
  Primer
ccagaaagcaaacaagaccc

SEQ ID NO: 5542 - DNA, 22 bp, Artificial Sequence
  Primer
cctctacatcaaagccaatcca

SEQ ID NO: 5543 - DNA, 19 bp, Artificial Sequence
  Primer
ccaagaacaaggctctcca

SEQ ID NO: 5544 - DNA, 19 bp, Artificial Sequence
  Primer
cgcatcaacaccacagaaa

SEQ ID NO: 5545 - DNA, 25 bp, Artificial Sequence
  Primer
gccaataacgacatcacaatttcct

SEQ ID NO: 5546 - DNA, 21 bp, Artificial Sequence
  Primer
cacaagtcaccaatatggcaa

SEQ ID NO: 5547 - DNA, 22 bp, Artificial Sequence
  Primer
cgacatcacaatttcctgagac

SEQ ID NO: 5548 - DNA, 22 bp, Artificial Sequence
  Primer
ttcctcttcttcttcctcaact

SEQ ID NO: 5549 - DNA, 22 bp, Artificial Sequence
  Primer
tccaagaacacactcagacatt

SEQ ID NO: 5550 - DNA, 24 bp, Artificial Sequence
  Primer
cactcagacattttagtagcagca

SEQ ID NO: 5551 - DNA, 20 bp, Artificial Sequence
  Primer
tgaaagaacctcaccgtcaa

SEQ ID NO: 5552 - DNA, 19 bp, Artificial Sequence
  Primer
gaagccgagccaaacatac

SEQ ID NO: 5553 - DNA, 19 bp, Artificial Sequence
  Primer
tcgcatcaacaccacagaa

SEQ ID NO: 5554 - DNA, 19 bp, Artificial Sequence
  Primer
gcgagcaagaacaagagag

SEQ ID NO: 5555 - DNA, 22 bp, Artificial Sequence
  Primer
tcctcttcttcttcctcaactc

SEQ ID NO: 5556 - DNA, 18 bp, Artificial Sequence
  Primer
catcgcatcaacaccaca

SEQ ID NO: 5557 - DNA, 22 bp, Artificial Sequence
  Primer
gatgccaataacgacatcacaa

SEQ ID NO: 5558 - DNA, 22 bp, Artificial Sequence
  Primer
cgacatcacaatttcctgagac

SEQ ID NO: 5559 - DNA, 21 bp, Artificial Sequence
  Primer
agaacgacttcagaatcacca

SEQ ID NO: 5560 - DNA, 20 bp, Artificial Sequence
  Primer
gccagtaaaccaggagacaa

SEQ ID NO: 5561 - DNA, 21 bp, Artificial Sequence
  Primer
ccaagaacacactcagacatt

SEQ ID NO: 5562 - DNA, 21 bp, Artificial Sequence
  Primer
agaacgacttcagaatcacca

SEQ ID NO: 5563 - DNA, 21 bp, Artificial Sequence
  Primer
ttccacataagcagccataag

SEQ ID NO: 5564 - DNA, 25 bp, Artificial Sequence
  Primer
gccaataacgacatcacaatttcct

SEQ ID NO: 5565 - DNA, 20 bp, Artificial Sequence
  Primer
gccctctacatcaaagccaa

SEQ ID NO: 5566 - DNA, 19 bp, Artificial Sequence
  Primer
gccctctacatcaaagcca

SEQ ID NO: 5567 - DNA, 20 bp, Artificial Sequence
  Primer
catcgtcctcttcttcctca

SEQ ID NO: 5568 - DNA, 22 bp, Artificial Sequence
  Primer
ccactctaccatcaaacaagac

SEQ ID NO: 5569 - DNA, 18 bp, Artificial Sequence
  Primer
tgcctgaaatgtcgccaa

SEQ ID NO: 5570 - DNA, 19 bp, Artificial Sequence
  Primer
tcaatgggatcagtgccaa

SEQ ID NO: 5571 - DNA, 20 bp, Artificial Sequence
  Primer
acctgtccttccactctacc

SEQ ID NO: 5572 - DNA, 21 bp, Artificial Sequence
  Primer
ctgtccttccactctaccatc

SEQ ID NO: 5573 - DNA, 25 bp, Artificial Sequence
  Primer
gagcaagcatttctctcaaattcca

SEQ ID NO: 5574 - DNA, 21 bp, Artificial Sequence
  Primer
agttacttttgccctcttgtc

SEQ ID NO: 5575 - DNA, 18 bp, Artificial Sequence
  Primer
aatgcctgaaatgtcgcc

SEQ ID NO: 5576 - DNA, 22 bp, Artificial Sequence
  Primer
cgacatcacaatttcctgagac

SEQ ID NO: 5577 - DNA, 19 bp, Artificial Sequence
  Primer
aggcagcacaagtcaccaa

SEQ ID NO: 5578 - DNA, 19 bp, Artificial Sequence
  Primer
agccgagccaaacatacca

SEQ ID NO: 5579 - DNA, 22 bp, Artificial Sequence
  Primer
actactctaacagaaccctcca

SEQ ID NO: 5580 - DNA, 21 bp, Artificial Sequence
  Primer
cagacacatctaaagcaccca

SEQ ID NO: 5581 - DNA, 20 bp, Artificial Sequence
  Primer
catcgtcctcttcttcctca

SEQ ID NO: 5582 - DNA, 20 bp, Artificial Sequence
  Primer
tccagaaagcaaacaagacc

SEQ ID NO: 5583 - DNA, 18 bp, Artificial Sequence
  Primer
aatgaagccgagccaaac

SEQ ID NO: 5584 - DNA, 18 bp, Artificial Sequence
  Primer
cacacaacggcatcatca

SEQ ID NO: 5585 - DNA, 19 bp, Artificial Sequence
  Primer
gaagccgagccaaacatac

SEQ ID NO: 5586 - DNA, 22 bp, Artificial Sequence
  Primer
cataaagtagtaggcagcacaa

SEQ ID NO: 5587 - DNA, 22 bp, Artificial Sequence
  Primer
acaactacagccataacctttc

SEQ ID NO: 5588 - DNA, 19 bp, Artificial Sequence
  Primer
aagccgagccaaacatacc

SEQ ID NO: 5589 - DNA, 20 bp, Artificial Sequence
  Primer
cagcagtagacacctctctt

SEQ ID NO: 5590 - DNA, 18 bp, Artificial Sequence
  Primer
tgcctgaaatgtcgccaa

SEQ ID NO: 5591 - DNA, 20 bp, Artificial Sequence
  Primer
acctgtccttccactctacc

SEQ ID NO: 5592 - DNA, 22 bp, Artificial Sequence
  Primer
gccacaaggttaaagtcattca

SEQ ID NO: 5593 - DNA, 20 bp, Artificial Sequence
  Primer
agacacatctaaagcaccca

SEQ ID NO: 5594 - DNA, 18 bp, Artificial Sequence
  Primer
tgtgactccattgacgct

SEQ ID NO: 5595 - DNA, 18 bp, Artificial Sequence
  Primer
tgtgactccattgacgct

SEQ ID NO: 5596 - DNA, 19 bp, Artificial Sequence
  Primer
gcacccttcaactttgcct

SEQ ID NO: 5597 - DNA, 18 bp, Artificial Sequence
  Primer
tcagcagcaagaacgcaa

SEQ ID NO: 5598 - DNA, 18 bp, Artificial Sequence
  Primer
cgcatcaacaccacagaa

SEQ ID NO: 5599 - DNA, 21 bp, Artificial Sequence
  Primer
gtcacaactacagccataacc

SEQ ID NO: 5600 - DNA, 21 bp, Artificial Sequence
  Primer
cacaatacacaagcacctaca

SEQ ID NO: 5601 - DNA, 21 bp, Artificial Sequence
  Primer
ccctctacatcaaagccaatc

SEQ ID NO: 5602 - DNA, 19 bp, Artificial Sequence
  Primer
aagccgagccaaacatacc

SEQ ID NO: 5603 - DNA, 19 bp, Artificial Sequence
  Primer
gccgagccaaacataccaa

SEQ ID NO: 5604 - DNA, 20 bp, Artificial Sequence
  Primer
gcaccaaatatgcctgctga

SEQ ID NO: 5605 - DNA, 19 bp, Artificial Sequence
  Primer
gtgatgaggagcgagaaga

SEQ ID NO: 5606 - DNA, 22 bp, Artificial Sequence
  Primer
gcccaaaagattagacaaccac

SEQ ID NO: 5607 - DNA, 21 bp, Artificial Sequence
  Primer
ctgaaatgtcgccaagatcaa

SEQ ID NO: 5608 - DNA, 20 bp, Artificial Sequence
  Primer
caacagtagtgcccaaaaga

SEQ ID NO: 5609 - DNA, 19 bp, Artificial Sequence
  Primer
acccatacgatgccttctt

SEQ ID NO: 5610 - DNA, 22 bp, Artificial Sequence
  Primer
gcccaaaagattagacaaccac

SEQ ID NO: 5611 - DNA, 19 bp, Artificial Sequence
  Primer
atacaggcaccgcaacgaa

SEQ ID NO: 5612 - DNA, 20 bp, Artificial Sequence
  Primer
gcaataataccaccagccac

SEQ ID NO: 5613 - DNA, 21 bp, Artificial Sequence
  Primer
ggctcccttattaccgttctt

SEQ ID NO: 5614 - DNA, 22 bp, Artificial Sequence
  Primer
actactctaacagaaccctcca

SEQ ID NO: 5615 - DNA, 20 bp, Artificial Sequence
  Primer
caacagtagtgcccaaaaga

SEQ ID NO: 5616 - DNA, 21 bp, Artificial Sequence
  Primer
ctgaaatgtcgccaagatcaa

SEQ ID NO: 5617 - DNA, 19 bp, Artificial Sequence
  Primer
gtgatgaggagcgagaaga

SEQ ID NO: 5618 - DNA, 19 bp, Artificial Sequence
  Primer
aagccgagccaaacatacc

SEQ ID NO: 5619 - DNA, 19 bp, Artificial Sequence
  Primer
gccgagccaaacataccaa

SEQ ID NO: 5620 - DNA, 21 bp, Artificial Sequence
  Primer
agcatcaccatagtcaccttt

SEQ ID NO: 5621 - DNA, 21 bp, Artificial Sequence
  Primer
gcatcaccatagtcacctttt

SEQ ID NO: 5622 - DNA, 20 bp, Artificial Sequence
  Primer
cagcaatgaagccgagccaa

SEQ ID NO: 5623 - DNA, 20 bp, Artificial Sequence
  Primer
agcaatgaagccgagccaaa

SEQ ID NO: 5624 - DNA, 24 bp, Artificial Sequence
  Primer
ttagtccagcaatgaagccgagcc

SEQ ID NO: 5625 - DNA, 24 bp, Artificial Sequence
  Primer
ttagtccagcaatgaagccgagcc

SEQ ID NO: 5626 - DNA, 22 bp, Artificial Sequence
  Primer
tccagcaatgaagccgagccaa

SEQ ID NO: 5627 - DNA, 22 bp, Artificial Sequence
  Primer
ccagcaatgaagccgagccaaa

SEQ ID NO: 5628 - DNA, 22 bp, Artificial Sequence
  Primer
gcatcaccatagtcaccttttt

SEQ ID NO: 5629 - DNA, 22 bp, Artificial Sequence
  Primer
gcccaaaagattagacaaccac

SEQ ID NO: 5630 - DNA, 22 bp, Artificial Sequence
  Primer
actactctaacagaaccctcca

SEQ ID NO: 5631 - DNA, 23 bp, Artificial Sequence
  Primer
gcctgaaatgtcgccaagatcaa

SEQ ID NO: 5632 - DNA, 21 bp, Artificial Sequence
  Primer
cacaagtcaccaatatggcaa

SEQ ID NO: 5633 - DNA, 20 bp, Artificial Sequence
  Primer
tctcctggaagcgacagcaa

SEQ ID NO: 5634 - DNA, 22 bp, Artificial Sequence
  Primer
actactctaacagaaccctcca

SEQ ID NO: 5635 - DNA, 24 bp, Artificial Sequence
  Primer
tgtagaagcagagaaagatgccaa

SEQ ID NO: 5636 - DNA, 20 bp, Artificial Sequence
  Primer
ggcaataataccaccagcca

SEQ ID NO: 5637 - DNA, 25 bp, Artificial Sequence
  Primer
tgtagaagcagagaaagatgccaaa

SEQ ID NO: 5638 - DNA, 18 bp, Artificial Sequence
  Primer
cgcatcaacaccacagaa

SEQ ID NO: 5639 - DNA, 18 bp, Artificial Sequence
  Primer
atgcgagcagatgggtaa

SEQ ID NO: 5640 - DNA, 19 bp, Artificial Sequence
  Primer
cgcatcaacaccacagaaa

SEQ ID NO: 5641 - DNA, 20 bp, Artificial Sequence
  Primer
cgcatcaacaccacagaaaa

SEQ ID NO: 5642 - DNA, 22 bp, Artificial Sequence
  Primer
ggaaccatccataagcacataa

SEQ ID NO: 5643 - DNA, 21 bp, Artificial Sequence
  Primer
ccctctacatcaaagccaatc

SEQ ID NO: 5644 - DNA, 22 bp, Artificial Sequence
  Primer
gccagtcttcctcttcttcttc

SEQ ID NO: 5645 - DNA, 20 bp, Artificial Sequence
  Primer
ctatgcgagcagatgggtaa

SEQ ID NO: 5646 - DNA, 21 bp, Artificial Sequence
  Primer
gccagtcttcctcttcttctt

SEQ ID NO: 5647 - DNA, 22 bp, Artificial Sequence
  Primer
actactctaacagaaccctcca

SEQ ID NO: 5648 - DNA, 21 bp, Artificial Sequence
  Primer
agccataacctttccacattc

SEQ ID NO: 5649 - DNA, 20 bp, Artificial Sequence
  Primer
agacacatctaaagcaccca

SEQ ID NO: 5650 - DNA, 18 bp, Artificial Sequence
  Primer
atgcgagcagatgggtaa

SEQ ID NO: 5651 - DNA, 22 bp, Artificial Sequence
  Primer
gcagaaaggctaaaaagcacaa

SEQ ID NO: 5652 - DNA, 22 bp, Artificial Sequence
  Primer
cttttcacatagggcatcaaca

SEQ ID NO: 5653 - DNA, 20 bp, Artificial Sequence
  Primer
gcagcaagaacgcacaataa

SEQ ID NO: 5654 - DNA, 22 bp, Artificial Sequence
  Primer
aaacaagaccctcctactgtaa

SEQ ID NO: 5655 - DNA, 23 bp, Artificial Sequence
  Primer
ttactactctaacagaaccctcc

SEQ ID NO: 5656 - DNA, 23 bp, Artificial Sequence
  Primer
gcaccaaatatgcctgctgacaa

SEQ ID NO: 5657 - DNA, 19 bp, Artificial Sequence
  Primer
gcacccttcaactttgcct

SEQ ID NO: 5658 - DNA, 25 bp, Artificial Sequence
  Primer
caccaaatatgcctgctgacaacaa

SEQ ID NO: 5659 - DNA, 21 bp, Artificial Sequence
  Primer
agccataacctttccacattc

SEQ ID NO: 5660 - DNA, 21 bp, Artificial Sequence
  Primer
agcatcaccatagtcaccttt

SEQ ID NO: 5661 - DNA, 22 bp, Artificial Sequence
  Primer
agcatcaccatagtcacctttt

SEQ ID NO: 5662 - DNA, 22 bp, Artificial Sequence
  Primer
gcatcaccatagtcaccttttt

SEQ ID NO: 5663 - DNA, 21 bp, Artificial Sequence
  Primer
tgcccaaaagattagacaacc

SEQ ID NO: 5664 - DNA, 20 bp, Artificial Sequence
  Primer
gaagcagagaaagatgccaa

SEQ ID NO: 5665 - DNA, 20 bp, Artificial Sequence
  Primer
ccagaaagcaaacaagaccc

SEQ ID NO: 5666 - DNA, 22 bp, Artificial Sequence
  Primer
gtgaaagacatcagcatactcc

SEQ ID NO: 5667 - DNA, 23 bp, Artificial Sequence
  Primer
accataatcagggacaacaacca

SEQ ID NO: 5668 - DNA, 20 bp, Artificial Sequence
  Primer
gattcatcgcatcaacacca

SEQ ID NO: 5669 - DNA, 23 bp, Artificial Sequence
  Primer
gcaccaaatatgcctgctgacaa

SEQ ID NO: 5670 - DNA, 24 bp, Artificial Sequence
  Primer
accaaatatgcctgctgacaacaa

SEQ ID NO: 5671 - DNA, 20 bp, Artificial Sequence
  Primer
cagacacatctaaagcaccc

SEQ ID NO: 5672 - DNA, 21 bp, Artificial Sequence
  Primer
cccagcaccatacctctattt

SEQ ID NO: 5673 - DNA, 20 bp, Artificial Sequence
  Primer
gcagcaagaacgcacaataa

SEQ ID NO: 5674 - DNA, 22 bp, Artificial Sequence
  Primer
gccctctacatcaaagccaatc

SEQ ID NO: 5675 - DNA, 20 bp, Artificial Sequence
  Primer
agattcatcgcatcaacacc

SEQ ID NO: 5676 - DNA, 22 bp, Artificial Sequence
  Primer
aaacaagaccctcctactgtaa

SEQ ID NO: 5677 - DNA, 21 bp, Artificial Sequence
  Primer
gaagcagagaaagatgccaaa

SEQ ID NO: 5678 - DNA, 22 bp, Artificial Sequence
  Primer
gaagcagagaaagatgccaaaa

SEQ ID NO: 5679 - DNA, 20 bp, Artificial Sequence
  Primer
aagccaatccacgcacgaac

SEQ ID NO: 5680 - DNA, 22 bp, Artificial Sequence
  Primer
acaactacagccataacctttc

SEQ ID NO: 5681 - DNA, 21 bp, Artificial Sequence
  Primer
agaagcagagaaagatgccaa

SEQ ID NO: 5682 - DNA, 19 bp, Artificial Sequence
  Primer
tcaaagccaatccacgcac

SEQ ID NO: 5683 - DNA, 21 bp, Artificial Sequence
  Primer
agaatcggacaccatagtcaa

SEQ ID NO: 5684 - DNA, 21 bp, Artificial Sequence
  Primer
aagaatcggacaccatagtca

SEQ ID NO: 5685 - DNA, 20 bp, Artificial Sequence
  Primer
caactgtcacctgtcacttc

SEQ ID NO: 5686 - DNA, 21 bp, Artificial Sequence
  Primer
tctacatcaaagccaatccac

SEQ ID NO: 5687 - DNA, 21 bp, Artificial Sequence
  Primer
gaagcagagaaagatgccaaa

SEQ ID NO: 5688 - DNA, 22 bp, Artificial Sequence
  Primer
gaagcagagaaagatgccaaaa

SEQ ID NO: 5689 - DNA, 21 bp, Artificial Sequence
  Primer
tatagcagccaacataggcaa

SEQ ID NO: 5690 - DNA, 18 bp, Artificial Sequence
  Primer
tgaagcaccaccaaagga

SEQ ID NO: 5691 - DNA, 22 bp, Artificial Sequence
  Primer
caacaatgagaaaaagtggcga

SEQ ID NO: 5692 - DNA, 20 bp, Artificial Sequence
  Primer
aagccaatccacgcacgaac

SEQ ID NO: 5693 - DNA, 19 bp, Artificial Sequence
  Primer
agcagcctgtgagggaaaa

SEQ ID NO: 5694 - DNA, 21 bp, Artificial Sequence
  Primer
tgagaaaaagtggcgagtaga

SEQ ID NO: 5695 - DNA, 20 bp, Artificial Sequence
  Primer
cgcatcaacaccacagaaaa

SEQ ID NO: 5696 - DNA, 20 bp, Artificial Sequence
  Primer
tccagaaagcaaacaagacc

SEQ ID NO: 5697 - DNA, 21 bp, Artificial Sequence
  Primer
ccctctacatcaaagccaatc

SEQ ID NO: 5698 - DNA, 20 bp, Artificial Sequence
  Primer
ccagaaagcaaacaagaccc

SEQ ID NO: 5699 - DNA, 19 bp, Artificial Sequence
  Primer
aggcagcacaagtcaccaa

SEQ ID NO: 5700 - DNA, 23 bp, Artificial Sequence
  Primer
gcatcaccatagtcacctttttc

SEQ ID NO: 5701 - DNA, 18 bp, Artificial Sequence
  Primer
catcgcatcaacaccaca

SEQ ID NO: 5702 - DNA, 19 bp, Artificial Sequence
  Primer
cgcatcaacaccacagaaa

SEQ ID NO: 5703 - DNA, 22 bp, Artificial Sequence
  Primer
aaacaagaccctcctactgtaa

SEQ ID NO: 5704 - DNA, 20 bp, Artificial Sequence
  Primer
gcaataataccaccagccac

SEQ ID NO: 5705 - DNA, 18 bp, Artificial Sequence
  Primer
cgcatcaacaccacagaa

SEQ ID NO: 5706 - DNA, 20 bp, Artificial Sequence
  Primer
gcatcaacaccacagaaaac

SEQ ID NO: 5707 - DNA, 22 bp, Artificial Sequence
  Primer
cagcaacaatgagaaaaagtgg

SEQ ID NO: 5708 - DNA, 19 bp, Artificial Sequence
  Primer
taacaccagcagcctgtga

SEQ ID NO: 5709 - DNA, 20 bp, Artificial Sequence
  Primer
gcacaaacctacctcccttc

SEQ ID NO: 5710 - DNA, 19 bp, Artificial Sequence
  Primer
gctatccgcatcaacaact

SEQ ID NO: 5711 - DNA, 19 bp, Artificial Sequence
  Primer
tcaatgggatcagtgccaa

SEQ ID NO: 5712 - DNA, 18 bp, Artificial Sequence
  Primer
tgaagcaccaccaaagga

SEQ ID NO: 5713 - DNA, 22 bp, Artificial Sequence
  Primer
ctctacatcaaagccaatccac

SEQ ID NO: 5714 - DNA, 25 bp, Artificial Sequence
  Primer
gtagaagcagagaaagatgccaaaa

SEQ ID NO: 5715 - DNA, 19 bp, Artificial Sequence
  Primer
tcaaagccaatccacgcac

SEQ ID NO: 5716 - DNA, 22 bp, Artificial Sequence
  Primer
agaagcagagaaagatgccaaa

SEQ ID NO: 5717 - DNA, 22 bp, Artificial Sequence
  Primer
ccgatggcaaaatgactcttac

SEQ ID NO: 5718 - DNA, 20 bp, Artificial Sequence
  Primer
aagccaatccacgcacgaac

SEQ ID NO: 5719 - DNA, 23 bp, Artificial Sequence
  Primer
gtagaagcagagaaagatgccaa

SEQ ID NO: 5720 - DNA, 21 bp, Artificial Sequence
  Primer
cacaagtcaccaatatggcaa

SEQ ID NO: 5721 - DNA, 20 bp, Artificial Sequence
  Primer
ccagaaagcaaacaagaccc

SEQ ID NO: 5722 - DNA, 21 bp, Artificial Sequence
  Primer
ccctctacatcaaagccaatc

SEQ ID NO: 5723 - DNA, 20 bp, Artificial Sequence
  Primer
cgcatcaacaccacagaaaa

SEQ ID NO: 5724 - DNA, 19 bp, Artificial Sequence
  Primer
cgcatcaacaccacagaaa

SEQ ID NO: 5725 - DNA, 21 bp, Artificial Sequence
  Primer
actatgcgagcagatgggtaa

SEQ ID NO: 5726 - DNA, 18 bp, Artificial Sequence
  Primer
cgcatcaacaccacagaa

SEQ ID NO: 5727 - DNA, 23 bp, Artificial Sequence
  Primer
tgcccaaaagattagacaaccac

SEQ ID NO: 5728 - DNA, 21 bp, Artificial Sequence
  Primer
ggcacactgataaacaccaga

SEQ ID NO: 5729 - DNA, 22 bp, Artificial Sequence
  Primer
aaacaagaccctcctactgtaa

SEQ ID NO: 5730 - DNA, 23 bp, Artificial Sequence
  Primer
tccgatggcaaaatgactcttac

SEQ ID NO: 5731 - DNA, 18 bp, Artificial Sequence
  Primer
taaagccccactgctgaa

SEQ ID NO: 5732 - DNA, 19 bp, Artificial Sequence
  Primer
accaccagccactactgaa

SEQ ID NO: 5733 - DNA, 21 bp, Artificial Sequence
  Primer
cgcatcaacaccacagaaaac

SEQ ID NO: 5734 - DNA, 21 bp, Artificial Sequence
  Primer
tctacatcaaagccaatccac

SEQ ID NO: 5735 - DNA, 19 bp, Artificial Sequence
  Primer
gcacccttcaactttgcct

SEQ ID NO: 5736 - DNA, 22 bp, Artificial Sequence
  Primer
gcagaaagacacgcaatcataa

SEQ ID NO: 5737 - DNA, 20 bp, Artificial Sequence
  Primer
gtttacatagcccatctgcc

SEQ ID NO: 5738 - DNA, 21 bp, Artificial Sequence
  Primer
gaagcagacacatctaaagca

SEQ ID NO: 5739 - DNA, 20 bp, Artificial Sequence
  Primer
gtttacatagcccatctgcc

SEQ ID NO: 5740 - DNA, 21 bp, Artificial Sequence
  Primer
gtcacaactacagccataacc

SEQ ID NO: 5741 - DNA, 22 bp, Artificial Sequence
  Primer
gcagaaagacacgcaatcataa

SEQ ID NO: 5742 - DNA, 22 bp, Artificial Sequence
  Primer
ctctacgaagtcataccaatcc

SEQ ID NO: 5743 - DNA, 20 bp, Artificial Sequence
  Primer
gtttacatagcccatctgcc

SEQ ID NO: 5744 - DNA, 20 bp, Artificial Sequence
  Primer
tctcctggaagcgacagcaa

SEQ ID NO: 5745 - DNA, 18 bp, Artificial Sequence
  Primer
taaagccccactgctgaa

SEQ ID NO: 5746 - DNA, 18 bp, Artificial Sequence
  Primer
aatgcctgaaatgtcgcc

SEQ ID NO: 5747 - DNA, 24 bp, Artificial Sequence
  Primer
ctgtgtaataaaccaagaagtgcc

SEQ ID NO: 5748 - DNA, 20 bp, Artificial Sequence
  Primer
gctacaccctttgctaactc

SEQ ID NO: 5749 - DNA, 21 bp, Artificial Sequence
  Primer
tctacatcaaagccaatccac

SEQ ID NO: 5750 - DNA, 21 bp, Artificial Sequence
  Primer
ctgaaatgtcgccaagatcaa

SEQ ID NO: 5751 - DNA, 20 bp, Artificial Sequence
  Primer
gaaagcaaacaagaccctcc

SEQ ID NO: 5752 - DNA, 19 bp, Artificial Sequence
  Primer
atgtcagccgcaggaagaa

SEQ ID NO: 5753 - DNA, 20 bp, Artificial Sequence
  Primer
gccctctacatcaaagccaa

SEQ ID NO: 5754 - DNA, 20 bp, Artificial Sequence
  Primer
ccagaaagcaaacaagaccc

SEQ ID NO: 5755 - DNA, 20 bp, Artificial Sequence
  Primer
gctacaccctttgctaactc

SEQ ID NO: 5756 - DNA, 20 bp, Artificial Sequence
  Primer
atcagcagaagctccactca

SEQ ID NO: 5757 - DNA, 20 bp, Artificial Sequence
  Primer
tccagaaagcaaacaagacc

SEQ ID NO: 5758 - DNA, 18 bp, Artificial Sequence
  Primer
tagcagccaacataggca

SEQ ID NO: 5759 - DNA, 20 bp, Artificial Sequence
  Primer
agattcatcgcatcaacacc

SEQ ID NO: 5760 - DNA, 20 bp, Artificial Sequence
  Primer
ccaaatatgcctgctgacaa

SEQ ID NO: 5761 - DNA, 23 bp, Artificial Sequence
  Primer
gtagagcatagactaaatcagcc

SEQ ID NO: 5762 - DNA, 24 bp, Artificial Sequence
  Primer
gccaataacgacatcacaatttcc

SEQ ID NO: 5763 - DNA, 21 bp, Artificial Sequence
  Primer
tctacatcaaagccaatccac

SEQ ID NO: 5764 - DNA, 20 bp, Artificial Sequence
  Primer
cacaacggcatcatcagaaa

SEQ ID NO: 5765 - DNA, 19 bp, Artificial Sequence
  Primer
atagcagccaacataggca

SEQ ID NO: 5766 - DNA, 20 bp, Artificial Sequence
  Primer
tccaagaacacactcagaca

SEQ ID NO: 5767 - DNA, 22 bp, Artificial Sequence
  Primer
catacaaactaccaccatcaca

SEQ ID NO: 5768 - DNA, 21 bp, Artificial Sequence
  Primer
ctaacagaaccctccaggtaa

SEQ ID NO: 5769 - DNA, 20 bp, Artificial Sequence
  Primer
tgacagccctctacatcaaa

SEQ ID NO: 5770 - DNA, 21 bp, Artificial Sequence
  Primer
ccaagaacacactcagacatt

SEQ ID NO: 5771 - DNA, 21 bp, Artificial Sequence
  Primer
tccaagaacacactcagacat

SEQ ID NO: 5772 - DNA, 20 bp, Artificial Sequence
  Primer
atgacagccctctacatcaa

SEQ ID NO: 5773 - DNA, 25 bp, Artificial Sequence
  Primer
aacacgttcacgactcagtatctca

SEQ ID NO: 5774 - DNA, 23 bp, Artificial Sequence
  Primer
gtagagcatagactaaatcagcc

SEQ ID NO: 5775 - DNA, 20 bp, Artificial Sequence
  Primer
atcagcagaagctccactca

SEQ ID NO: 5776 - DNA, 18 bp, Artificial Sequence
  Primer
agcagccaacataggcaa

SEQ ID NO: 5777 - DNA, 20 bp, Artificial Sequence
  Primer
tccaagaacacactcagaca

SEQ ID NO: 5778 - DNA, 20 bp, Artificial Sequence
  Primer
tccaagaacacactcagaca

SEQ ID NO: 5779 - DNA, 18 bp, Artificial Sequence
  Primer
gcagccaacataggcaaa

SEQ ID NO: 5780 - DNA, 20 bp, Artificial Sequence
  Primer
atcagcagaagctccactca

SEQ ID NO: 5781 - DNA, 25 bp, Artificial Sequence
  Primer
cccactgctgaacatcaatcataaa

SEQ ID NO: 5782 - DNA, 21 bp, Artificial Sequence
  Primer
actacagccataacctttcca

SEQ ID NO: 5783 - DNA, 19 bp, Artificial Sequence
  Primer
ccaaatgtccatccagcag

SEQ ID NO: 5784 - DNA, 20 bp, Artificial Sequence
  Primer
atcagcagaagctccactca

SEQ ID NO: 5785 - DNA, 19 bp, Artificial Sequence
  Primer
gcaccaaatgtccatccag

SEQ ID NO: 5786 - DNA, 22 bp, Artificial Sequence
  Primer
cctctacatcaaagccaatcca

SEQ ID NO: 5787 - DNA, 19 bp, Artificial Sequence
  Primer
ccagcaccaaatgtccatc

SEQ ID NO: 5788 - DNA, 23 bp, Artificial Sequence
  Primer
ttactactctaacagaaccctcc

SEQ ID NO: 5789 - DNA, 18 bp, Artificial Sequence
  Primer
tcaaagccaatccacgca

SEQ ID NO: 5790 - DNA, 19 bp, Artificial Sequence
  Primer
aacacacagcctccaaaac

SEQ ID NO: 5791 - DNA, 19 bp, Artificial Sequence
  Primer
cagcaccaaatgtccatcc

SEQ ID NO: 5792 - DNA, 21 bp, Artificial Sequence
  Primer
tccaagaacacactcagacat

SEQ ID NO: 5793 - DNA, 25 bp, Artificial Sequence
  Primer
catcaatttcttcttcctcacactc

SEQ ID NO: 5794 - DNA, 22 bp, Artificial Sequence
  Primer
agactcacaaggactatcagaa

SEQ ID NO: 5795 - DNA, 21 bp, Artificial Sequence
  Primer
tccaagaacacactcagacat

SEQ ID NO: 5796 - DNA, 20 bp, Artificial Sequence
  Primer
tccaagaacacactcagaca

SEQ ID NO: 5797 - DNA, 19 bp, Artificial Sequence
  Primer
gccctctacatcaaagcca

SEQ ID NO: 5798 - DNA, 19 bp, Artificial Sequence
  Primer
ccaagaacaaggctctcca

SEQ ID NO: 5799 - DNA, 19 bp, Artificial Sequence
  Primer
ccagcaccaaatgtccatc

SEQ ID NO: 5800 - DNA, 19 bp, Artificial Sequence
  Primer
cgcatcaacaccacagaaa

SEQ ID NO: 5801 - DNA, 20 bp, Artificial Sequence
  Primer
cgcatcaacaccacagaaaa

SEQ ID NO: 5802 - DNA, 20 bp, Artificial Sequence
  Primer
agcagcaagattagcagaag

SEQ ID NO: 5803 - DNA, 21 bp, Artificial Sequence
  Primer
ccaagaacacactcagacatt

SEQ ID NO: 5804 - DNA, 22 bp, Artificial Sequence
  Primer
gcaggcataagtatctgatgaa

SEQ ID NO: 5805 - DNA, 25 bp, Artificial Sequence
  Primer
gagcaagcatttctctcaaattcca

SEQ ID NO: 5806 - DNA, 20 bp, Artificial Sequence
  Primer
tcaacaccacagaaaactcc

SEQ ID NO: 5807 - DNA, 22 bp, Artificial Sequence
  Primer
cctctacatcaaagccaatcca

SEQ ID NO: 5808 - DNA, 20 bp, Artificial Sequence
  Primer
acgcactacattccagggca

SEQ ID NO: 5809 - DNA, 21 bp, Artificial Sequence
  Primer
tccaagaacacactcagacat

SEQ ID NO: 5810 - DNA, 20 bp, Artificial Sequence
  Primer
tccaagaacacactcagaca

SEQ ID NO: 5811 - DNA, 19 bp, Artificial Sequence
  Primer
agaggtggcaacactgtaa

SEQ ID NO: 5812 - DNA, 19 bp, Artificial Sequence
  Primer
aagccaatccacgcacgaa

SEQ ID NO: 5813 - DNA, 18 bp, Artificial Sequence
  Primer
tcaaagccaatccacgca

SEQ ID NO: 5814 - DNA, 22 bp, Artificial Sequence
  Primer
cctctacatcaaagccaatcca

SEQ ID NO: 5815 - DNA, 20 bp, Artificial Sequence
  Primer
gccctctacatcaaagccaa

SEQ ID NO: 5816 - DNA, 19 bp, Artificial Sequence
  Primer
gccctctacatcaaagcca

SEQ ID NO: 5817 - DNA, 18 bp, Artificial Sequence
  Primer
catcgcatcaacaccaca

SEQ ID NO: 5818 - DNA, 18 bp, Artificial Sequence
  Primer
tcaaagccaatccacgca

SEQ ID NO: 5819 - DNA, 19 bp, Artificial Sequence
  Primer
cgcatcaacaccacagaaa

SEQ ID NO: 5820 - DNA, 21 bp, Artificial Sequence
  Primer
gcccagcaccatacctctatt

SEQ ID NO: 5821 - DNA, 20 bp, Artificial Sequence
  Primer
cgcatcaacaccacagaaaa

SEQ ID NO: 5822 - DNA, 20 bp, Artificial Sequence
  Primer
aaagcacagaaggaaagcac

SEQ ID NO: 5823 - DNA, 19 bp, Artificial Sequence
  Primer
gccctctacatcaaagcca

SEQ ID NO: 5824 - DNA, 22 bp, Artificial Sequence
  Primer
caactacagccataacctttcc

SEQ ID NO: 5825 - DNA, 22 bp, Artificial Sequence
  Primer
acaactacagccataacctttc

SEQ ID NO: 5826 - DNA, 20 bp, Artificial Sequence
  Primer
tcaacaccacagaaaactcc

SEQ ID NO: 5827 - DNA, 22 bp, Artificial Sequence
  Primer
catcgcatcaacaccacagaaa

SEQ ID NO: 5828 - DNA, 22 bp, Artificial Sequence
  Primer
tatagcagccaacataggcaaa

SEQ ID NO: 5829 - DNA, 20 bp, Artificial Sequence
  Primer
tccaacaaagccaacatctc

SEQ ID NO: 5830 - DNA, 21 bp, Artificial Sequence
  Primer
cagaaccctgtgatgaatcaa

SEQ ID NO: 5831 - DNA, 19 bp, Artificial Sequence
  Primer
gcaacgccaataacaagcc

SEQ ID NO: 5832 - DNA, 19 bp, Artificial Sequence
  Primer
acgccaataacaagccatc

SEQ ID NO: 5833 - DNA, 19 bp, Artificial Sequence
  Primer
cgccaataacaagccatcc

SEQ ID NO: 5834 - DNA, 22 bp, Artificial Sequence
  Primer
cctctacatcaaagccaatcca

SEQ ID NO: 5835 - DNA, 21 bp, Artificial Sequence
  Primer
ccctctacatcaaagccaatc

SEQ ID NO: 5836 - DNA, 21 bp, Artificial Sequence
  Primer
gaagcagacttagaagcagac

SEQ ID NO: 5837 - DNA, 23 bp, Artificial Sequence
  Primer
catcgcatcaacaccacagaaaa

SEQ ID NO: 5838 - DNA, 19 bp, Artificial Sequence
  Primer
gccctctacatcaaagcca

SEQ ID NO: 5839 - DNA, 20 bp, Artificial Sequence
  Primer
gtctacctgtccttccactc

SEQ ID NO: 5840 - DNA, 23 bp, Artificial Sequence
  Primer
gcatcaacaccacagaaaactcc

SEQ ID NO: 5841 - DNA, 21 bp, Artificial Sequence
  Primer
aatgattccagcaggcataag

SEQ ID NO: 5842 - DNA, 22 bp, Artificial Sequence
  Primer
gtcttcctcttcttcttcctca

SEQ ID NO: 5843 - DNA, 20 bp, Artificial Sequence
  Primer
acctgtccttccactctacc

SEQ ID NO: 5844 - DNA, 22 bp, Artificial Sequence
  Primer
agtcttcctcttcttcttcctc

SEQ ID NO: 5845 - DNA, 20 bp, Artificial Sequence
  Primer
atgtcagccgcaggaagaag

SEQ ID NO: 5846 - DNA, 22 bp, Artificial Sequence
  Primer
atgtcagccgcaggaagaagag

SEQ ID NO: 5847 - DNA, 19 bp, Artificial Sequence
  Primer
cgcaggaagaagagtcaca

SEQ ID NO: 5848 - DNA, 21 bp, Artificial Sequence
  Primer
ctgaaatgtcgccaagatcaa

SEQ ID NO: 5849 - DNA, 21 bp, Artificial Sequence
  Primer
ctgtccttccactctaccatc

SEQ ID NO: 5850 - DNA, 20 bp, Artificial Sequence
  Primer
tgaaagaacctcaccgtcaa

SEQ ID NO: 5851 - DNA, 18 bp, Artificial Sequence
  Primer
taaagccccactgctgaa

SEQ ID NO: 5852 - DNA, 19 bp, Artificial Sequence
  Primer
cgcaggaagaagagtcaca

SEQ ID NO: 5853 - DNA, 24 bp, Artificial Sequence
  Primer
ctgtgtaataaaccaagaagtgcc

SEQ ID NO: 5854 - DNA, 25 bp, Artificial Sequence
  Primer
ccatcaaacaagacagtaagtgaag

SEQ ID NO: 5855 - DNA, 22 bp, Artificial Sequence
  Primer
gcccaaaagattagacaaccac

SEQ ID NO: 5856 - DNA, 25 bp, Artificial Sequence
  Primer
ccatcaaacaagacagtaagtgaag

SEQ ID NO: 5857 - DNA, 25 bp, Artificial Sequence
  Primer
ccatcaaacaagacagtaagtgaag

SEQ ID NO: 5858 - DNA, 21 bp, Artificial Sequence
  Primer
gtcacaactacagccataacc

SEQ ID NO: 5859 - DNA, 25 bp, Artificial Sequence
  Primer
ccatcaaacaagacagtaagtgaag

SEQ ID NO: 5860 - DNA, 21 bp, Artificial Sequence
  Primer
cagaaccctgtgatgaatcaa

SEQ ID NO: 5861 - DNA, 22 bp, Artificial Sequence
  Primer
cctctacatcaaagccaatcca

SEQ ID NO: 5862 - DNA, 22 bp, Artificial Sequence
  Primer
ctgttgaataatgccgtctact

SEQ ID NO: 5863 - DNA, 18 bp, Artificial Sequence
  Primer
ttagcagcatcaccagca

SEQ ID NO: 5864 - DNA, 21 bp, Artificial Sequence
  Primer
gggaaggacataaggtggtag

SEQ ID NO: 5865 - DNA, 20 bp, Artificial Sequence
  Primer
ctgtccttccactctaccat

SEQ ID NO: 5866 - DNA, 18 bp, Artificial Sequence
  Primer
agcagccaacataggcaa

SEQ ID NO: 5867 - DNA, 18 bp, Artificial Sequence
  Primer
gcagccaacataggcaaa

SEQ ID NO: 5868 - DNA, 20 bp, Artificial Sequence
  Primer
gtagccagtaaaccaggaga

SEQ ID NO: 5869 - DNA, 20 bp, Artificial Sequence
  Primer
cgcaggaagaagagtcacag

SEQ ID NO: 5870 - DNA, 23 bp, Artificial Sequence
  Primer
ggtagccctttccacaaaagtca

SEQ ID NO: 5871 - DNA, 20 bp, Artificial Sequence
  Primer
gcacttccaacaaagccaac

SEQ ID NO: 5872 - DNA, 21 bp, Artificial Sequence
  Primer
gtccttccactctaccatcaa

SEQ ID NO: 5873 - DNA, 20 bp, Artificial Sequence
  Primer
atcagcagaagctccactca

SEQ ID NO: 5874 - DNA, 19 bp, Artificial Sequence
  Primer
gccctctacatcaaagcca

SEQ ID NO: 5875 - DNA, 20 bp, Artificial Sequence
  Primer
atcagcagaagctccactca

SEQ ID NO: 5876 - DNA, 20 bp, Artificial Sequence
  Primer
agtccagcaatgaagccgag

SEQ ID NO: 5877 - DNA, 22 bp, Artificial Sequence
  Primer
caaatatgcctgctgacaacaa

SEQ ID NO: 5878 - DNA, 20 bp, Artificial Sequence
  Primer
ccaaatatgcctgctgacaa

SEQ ID NO: 5879 - DNA, 20 bp, Artificial Sequence
  Primer
cgcatcaacaccacagaaaa

SEQ ID NO: 5880 - DNA, 21 bp, Artificial Sequence
  Primer
actacagccataacctttcca

SEQ ID NO: 5881 - DNA, 22 bp, Artificial Sequence
  Primer
caactacagccataacctttcc

SEQ ID NO: 5882 - DNA, 22 bp, Artificial Sequence
  Primer
aaacaagaccctcctactgtaa

SEQ ID NO: 5883 - DNA, 22 bp, Artificial Sequence
  Primer
ccactctaccatcaaacaagac

SEQ ID NO: 5884 - DNA, 24 bp, Artificial Sequence
  Primer
cactcagacattttagtagcagca

SEQ ID NO: 5885 - DNA, 20 bp, Artificial Sequence
  Primer
agtccagcaatgaagccgag

SEQ ID NO: 5886 - DNA, 19 bp, Artificial Sequence
  Primer
atcatccagccagtcttcc

SEQ ID NO: 5887 - DNA, 25 bp, Artificial Sequence
  Primer
gagcaagcatttctctcaaattcca

SEQ ID NO: 5888 - DNA, 24 bp, Artificial Sequence
  Primer
ggtagtatctaaggctccactgaa

SEQ ID NO: 5889 - DNA, 25 bp, Artificial Sequence
  Primer
ggtagtatctaaggctccactgaaa

SEQ ID NO: 5890 - DNA, 20 bp, Artificial Sequence
  Primer
acctgtccttccactctacc

SEQ ID NO: 5891 - DNA, 20 bp, Artificial Sequence
  Primer
tgtccttccactctaccatc

SEQ ID NO: 5892 - DNA, 22 bp, Artificial Sequence
  Primer
acaactacagccataacctttc

SEQ ID NO: 5893 - DNA, 19 bp, Artificial Sequence
  Primer
gccagtaaaccaggagaca

SEQ ID NO: 5894 - DNA, 20 bp, Artificial Sequence
  Primer
tgaaagaacctcaccgtcaa

SEQ ID NO: 5895 - DNA, 20 bp, Artificial Sequence
  Primer
caacagtagtgcccaaaaga

SEQ ID NO: 5896 - DNA, 19 bp, Artificial Sequence
  Primer
acaacggcgacaagttcca

SEQ ID NO: 5897 - DNA, 19 bp, Artificial Sequence
  Primer
aacacacagcctccaaaac

SEQ ID NO: 5898 - DNA, 20 bp, Artificial Sequence
  Primer
attcatcgcatcaacaccac

SEQ ID NO: 5899 - DNA, 21 bp, Artificial Sequence
  Primer
gtcacaactacagccataacc

SEQ ID NO: 5900 - DNA, 20 bp, Artificial Sequence
  Primer
gacacatctaaagcacccac

SEQ ID NO: 5901 - DNA, 20 bp, Artificial Sequence
  Primer
gcacttccaacaaagccaac

SEQ ID NO: 5902 - DNA, 20 bp, Artificial Sequence
  Primer
tccagaaagcaaacaagacc

SEQ ID NO: 5903 - DNA, 21 bp, Artificial Sequence
  Primer
acttccaacaaagccaacatc

SEQ ID NO: 5904 - DNA, 20 bp, Artificial Sequence
  Primer
gtttacatagcccatctgcc

SEQ ID NO: 5905 - DNA, 20 bp, Artificial Sequence
  Primer
agcaaacaagaccctcctac

SEQ ID NO: 5906 - DNA, 20 bp, Artificial Sequence
  Primer
ttacatagcccatctgcctt

SEQ ID NO: 5907 - DNA, 21 bp, Artificial Sequence
  Primer
cataatcagggacaacaacca

SEQ ID NO: 5908 - DNA, 21 bp, Artificial Sequence
  Primer
agaacgacttcagaatcacca

SEQ ID NO: 5909 - DNA, 18 bp, Artificial Sequence
  Primer
gcaagtccgatggcaaaa

SEQ ID NO: 5910 - DNA, 18 bp, Artificial Sequence
  Primer
agcaagtccgatggcaaa

SEQ ID NO: 5911 - DNA, 20 bp, Artificial Sequence
  Primer
gccctctacatcaaagccaa

SEQ ID NO: 5912 - DNA, 19 bp, Artificial Sequence
  Primer
gccctctacatcaaagcca

SEQ ID NO: 5913 - DNA, 19 bp, Artificial Sequence
  Primer
catcgcatcaacaccacag

SEQ ID NO: 5914 - DNA, 23 bp, Artificial Sequence
  Primer
gcctatcctcagaataaccacca

SEQ ID NO: 5915 - DNA, 20 bp, Artificial Sequence
  Primer
tgtagccagtaaaccaggag

SEQ ID NO: 5916 - DNA, 19 bp, Artificial Sequence
  Primer
atgcaacagggtacacaga

SEQ ID NO: 5917 - DNA, 21 bp, Artificial Sequence
  Primer
agaacgacttcagaatcacca

SEQ ID NO: 5918 - DNA, 20 bp, Artificial Sequence
  Primer
agcaaacaagaccctcctac

SEQ ID NO: 5919 - DNA, 21 bp, Artificial Sequence
  Primer
ccttccactctaccatcaaac

SEQ ID NO: 5920 - DNA, 21 bp, Artificial Sequence
  Primer
ccttccactctaccatcaaac

SEQ ID NO: 5921 - DNA, 20 bp, Artificial Sequence
  Primer
gaaagcaaacaagaccctcc

SEQ ID NO: 5922 - DNA, 21 bp, Artificial Sequence
  Primer
ccttccactctaccatcaaac

SEQ ID NO: 5923 - DNA, 20 bp, Artificial Sequence
  Primer
gctcagagtcatcctcatca

SEQ ID NO: 5924 - DNA, 24 bp, Artificial Sequence
  Primer
ctgtgtaataaaccaagaagtgcc

SEQ ID NO: 5925 - DNA, 20 bp, Artificial Sequence
  Primer
tccagaaagcaaacaagacc

SEQ ID NO: 5926 - DNA, 22 bp, Artificial Sequence
  Primer
ccttccactctaccatcaaaca

SEQ ID NO: 5927 - DNA, 22 bp, Artificial Sequence
  Primer
aaacaagaccctcctactgtaa

SEQ ID NO: 5928 - DNA, 22 bp, Artificial Sequence
  Primer
agccacatcaagcctacaatac

SEQ ID NO: 5929 - DNA, 20 bp, Artificial Sequence
  Primer
tccagaaagcaaacaagacc

SEQ ID NO: 5930 - DNA, 22 bp, Artificial Sequence
  Primer
ccttccactctaccatcaaaca

SEQ ID NO: 5931 - DNA, 23 bp, Artificial Sequence
  Primer
acatcaagcctacaatacaagcc

SEQ ID NO: 5932 - DNA, 22 bp, Artificial Sequence
  Primer
aaacaagaccctcctactgtaa

SEQ ID NO: 5933 - DNA, 20 bp, Artificial Sequence
  Primer
tccagaaagcaaacaagacc

SEQ ID NO: 5934 - DNA, 23 bp, Artificial Sequence
  Primer
caaacaagaccctcctactgtaa

SEQ ID NO: 5935 - DNA, 20 bp, Artificial Sequence
  Primer
gcaccaaatatgcctgctga

SEQ ID NO: 5936 - DNA, 20 bp, Artificial Sequence
  Primer
gctcagagtcatcctcatca

SEQ ID NO: 5937 - DNA, 23 bp, Artificial Sequence
  Primer
ccattccttgtgtgtcttctact

SEQ ID NO: 5938 - DNA, 22 bp, Artificial Sequence
  Primer
ccactctaccatcaaacaagac

SEQ ID NO: 5939 - DNA, 20 bp, Artificial Sequence
  Primer
agcaaacaagaccctcctac

SEQ ID NO: 5940 - DNA, 22 bp, Artificial Sequence
  Primer
caaatatgcctgctgacaacaa

SEQ ID NO: 5941 - DNA, 20 bp, Artificial Sequence
  Primer
ccaaatatgcctgctgacaa

SEQ ID NO: 5942 - DNA, 20 bp, Artificial Sequence
  Primer
gcaccaaatatgcctgctga

SEQ ID NO: 5943 - DNA, 19 bp, Artificial Sequence
  Primer
cccttcaactttgcctgac

SEQ ID NO: 5944 - DNA, 20 bp, Artificial Sequence
  Primer
tcagtgagcagaggtggcaa

SEQ ID NO: 5945 - DNA, 23 bp, Artificial Sequence
  Primer
gctaagccacatcaagcctacaa

SEQ ID NO: 5946 - DNA, 20 bp, Artificial Sequence
  Primer
gataacagcagcatacagcc

SEQ ID NO: 5947 - DNA, 19 bp, Artificial Sequence
  Primer
tagaagcagactcgtcgca

SEQ ID NO: 5948 - DNA, 25 bp, Artificial Sequence
  Primer
ccacatcaagcctacaatacaagcc

SEQ ID NO: 5949 - DNA, 19 bp, Artificial Sequence
  Primer
aacccatacgatgccttct

SEQ ID NO: 5950 - DNA, 20 bp, Artificial Sequence
  Primer
agcaaacaagaccctcctac

SEQ ID NO: 5951 - DNA, 20 bp, Artificial Sequence
  Primer
gaaagcaaacaagaccctcc

SEQ ID NO: 5952 - DNA, 20 bp, Artificial Sequence
  Primer
gcaccaaatatgcctgctga

SEQ ID NO: 5953 - DNA, 20 bp, Artificial Sequence
  Primer
ctgtccttccactctaccat

SEQ ID NO: 5954 - DNA, 20 bp, Artificial Sequence
  Primer
acacgaagttgaacattgcc

SEQ ID NO: 5955 - DNA, 22 bp, Artificial Sequence
  Primer
gccacaaggttaaagtcattca

SEQ ID NO: 5956 - DNA, 20 bp, Artificial Sequence
  Primer
acctgtccttccactctacc

SEQ ID NO: 5957 - DNA, 21 bp, Artificial Sequence
  Primer
ggcacactgataaacaccaga

SEQ ID NO: 5958 - DNA, 21 bp, Artificial Sequence
  Primer
tctacctgtccttccactcta

SEQ ID NO: 5959 - DNA, 20 bp, Artificial Sequence
  Primer
gcaccaaatatgcctgctga

SEQ ID NO: 5960 - DNA, 23 bp, Artificial Sequence
  Primer
tcttcctcttcttcttcctcaac

SEQ ID NO: 5961 - DNA, 22 bp, Artificial Sequence
  Primer
catacaaactaccaccatcaca

SEQ ID NO: 5962 - DNA, 19 bp, Artificial Sequence
  Primer
cgtgatgtagccacagtga

SEQ ID NO: 5963 - DNA, 19 bp, Artificial Sequence
  Primer
cgcaagtgaccacgaatga

SEQ ID NO: 5964 - DNA, 25 bp, Artificial Sequence
  Primer
ctctactctaagttgttgaagaacc

SEQ ID NO: 5965 - DNA, 18 bp, Artificial Sequence
  Primer
tacgagcaaacagcctga

SEQ ID NO: 5966 - DNA, 22 bp, Artificial Sequence
  Primer
ctaagttgttgaagaaccgaga

SEQ ID NO: 5967 - DNA, 21 bp, Artificial Sequence
  Primer
aagttgttgaagaaccgagag

SEQ ID NO: 5968 - DNA, 22 bp, Artificial Sequence
  Primer
ctcagacattttagtagcagca

SEQ ID NO: 5969 - DNA, 23 bp, Artificial Sequence
  Primer
caaacaagaccctcctactgtaa

SEQ ID NO: 5970 - DNA, 24 bp, Artificial Sequence
  Primer
gcagcctcttcaagattaaaacca

SEQ ID NO: 5971 - DNA, 19 bp, Artificial Sequence
  Primer
agcatttcctcgcacaacc

SEQ ID NO: 5972 - DNA, 19 bp, Artificial Sequence
  Primer
agcatcacggtcaaactca

SEQ ID NO: 5973 - DNA, 25 bp, Artificial Sequence
  Primer
gagcaagcatttctctcaaattcca

SEQ ID NO: 5974 - DNA, 21 bp, Artificial Sequence
  Primer
gaagcagacttagaagcagac

SEQ ID NO: 5975 - DNA, 20 bp, Artificial Sequence
  Primer
tccagaaagcaaacaagacc

SEQ ID NO: 5976 - DNA, 22 bp, Artificial Sequence
  Primer
aaacaagaccctcctactgtaa

SEQ ID NO: 5977 - DNA, 21 bp, Artificial Sequence
  Primer
atcaagcctacaatacaagcc

SEQ ID NO: 5978 - DNA, 19 bp, Artificial Sequence
  Primer
gtgatgaggagcgagaaga

SEQ ID NO: 5979 - DNA, 20 bp, Artificial Sequence
  Primer
tccagaaagcaaacaagacc

SEQ ID NO: 5980 - DNA, 21 bp, Artificial Sequence
  Primer
cataatcagggacaacaacca

SEQ ID NO: 5981 - DNA, 21 bp, Artificial Sequence
  Primer
ctcagtagtatcatccagcca

SEQ ID NO: 5982 - DNA, 22 bp, Artificial Sequence
  Primer
aaacaagaccctcctactgtaa

SEQ ID NO: 5983 - DNA, 20 bp, Artificial Sequence
  Primer
tccagaaagcaaacaagacc

SEQ ID NO: 5984 - DNA, 19 bp, Artificial Sequence
  Primer
gctatccgcatcaacaact

SEQ ID NO: 5985 - DNA, 20 bp, Artificial Sequence
  Primer
gcacaaacctacctcccttc

SEQ ID NO: 5986 - DNA, 19 bp, Artificial Sequence
  Primer
gcagcaagcacaaaacaag

SEQ ID NO: 5987 - DNA, 20 bp, Artificial Sequence
  Primer
ccagaaagcaaacaagaccc

SEQ ID NO: 5988 - DNA, 22 bp, Artificial Sequence
  Primer
cataggctaaatccagcagaaa

SEQ ID NO: 5989 - DNA, 22 bp, Artificial Sequence
  Primer
caaatatgcctgctgacaacaa

SEQ ID NO: 5990 - DNA, 20 bp, Artificial Sequence
  Primer
tcgtcctcttcttcctcatc

SEQ ID NO: 5991 - DNA, 19 bp, Artificial Sequence
  Primer
aagcacagaaggaaagcac

SEQ ID NO: 5992 - DNA, 19 bp, Artificial Sequence
  Primer
gcacagaaggaaagcacag

SEQ ID NO: 5993 - DNA, 20 bp, Artificial Sequence
  Primer
gcatcgtcctcttcttcctc

SEQ ID NO: 5994 - DNA, 19 bp, Artificial Sequence
  Primer
gccagtaaaccaggagaca

SEQ ID NO: 5995 - DNA, 20 bp, Artificial Sequence
  Primer
gtagccagtaaaccaggaga

SEQ ID NO: 5996 - DNA, 20 bp, Artificial Sequence
  Primer
gcatcgtcctcttcttcctc

SEQ ID NO: 5997 - DNA, 22 bp, Artificial Sequence
  Primer
agtcttcctcttcttcttcctc

SEQ ID NO: 5998 - DNA, 21 bp, Artificial Sequence
  Primer
tgttgaacctcctcttgtctg

SEQ ID NO: 5999 - DNA, 22 bp, Artificial Sequence
  Primer
ccagtcttcctcttcttcttcc

SEQ ID NO: 6000 - DNA, 20 bp, Artificial Sequence
  Primer
gcatcgtcctcttcttcctc

SEQ ID NO: 6001 - DNA, 21 bp, Artificial Sequence
  Primer
tgttgaacctcctcttgtctg

SEQ ID NO: 6002 - DNA, 22 bp, Artificial Sequence
  Primer
agtcttcctcttcttcttcctc

SEQ ID NO: 6003 - DNA, 22 bp, Artificial Sequence
  Primer
agactcacaaggactatcagaa

SEQ ID NO: 6004 - DNA, 20 bp, Artificial Sequence
  Primer
gccagtaaaccaggagacaa

SEQ ID NO: 6005 - DNA, 22 bp, Artificial Sequence
  Primer
acatacaaactaccaccatcac

SEQ ID NO: 6006 - DNA, 22 bp, Artificial Sequence
  Primer
ctgatagtaatgccagcacaaa

SEQ ID NO: 6007 - DNA, 19 bp, Artificial Sequence
  Primer
gccagtaaaccaggagaca

SEQ ID NO: 6008 - DNA, 22 bp, Artificial Sequence
  Primer
cttttcacatagggcatcaaca

SEQ ID NO: 6009 - DNA, 20 bp, Artificial Sequence
  Primer
gtagccagtaaaccaggaga

SEQ ID NO: 6010 - DNA, 22 bp, Artificial Sequence
  Primer
acatacaaactaccaccatcac

SEQ ID NO: 6011 - DNA, 19 bp, Artificial Sequence
  Primer
acaacagcctctgctacaa

SEQ ID NO: 6012 - DNA, 19 bp, Artificial Sequence
  Primer
actcagcagcaagaacgca

SEQ ID NO: 6013 - DNA, 20 bp, Artificial Sequence
  Primer
gcaaaagcacagaaggaaag

SEQ ID NO: 6014 - DNA, 20 bp, Artificial Sequence
  Primer
gtagccagtaaaccaggaga

SEQ ID NO: 6015 - DNA, 19 bp, Artificial Sequence
  Primer
gccagtaaaccaggagaca

SEQ ID NO: 6016 - DNA, 18 bp, Artificial Sequence
  Primer
tgcctgaaatgtcgccaa

SEQ ID NO: 6017 - DNA, 22 bp, Artificial Sequence
  Primer
acatacaaactaccaccatcac

SEQ ID NO: 6018 - DNA, 20 bp, Artificial Sequence
  Primer
gtagccagtaaaccaggaga

SEQ ID NO: 6019 - DNA, 20 bp, Artificial Sequence
  Primer
agtttcgcctcaatccattc

SEQ ID NO: 6020 - DNA, 21 bp, Artificial Sequence
  Primer
agtttcgcctcaatccattca

SEQ ID NO: 6021 - DNA, 19 bp, Artificial Sequence
  Primer
atykygmgskakkygsgtg

SEQ ID NO: 6022 - DNA, 19 bp, Artificial Sequence
  Primer
gtgygtgsatmscrcttca

SEQ ID NO: 6023 - DNA, 21 bp, Artificial Sequence
  Primer
cttcackgwtctsttgtkwga

SEQ ID NO: 6024 - DNA, 23 bp, Artificial Sequence
  Primer
agraymyrwcacstcmskggytg

SEQ ID NO: 6025 - DNA, 23 bp, Artificial Sequence
  Primer
aaaygmrtatarmcrmcmytatg

SEQ ID NO: 6026 - DNA, 25 bp, Artificial Sequence
  Primer
crmcmytatgmrarawckwmgccca

SEQ ID NO: 6027 - DNA, 19 bp, Artificial Sequence
  Primer
tctatcrsmakggatgtct

SEQ ID NO: 6028 - DNA, 22 bp, Artificial Sequence
  Primer
ttagttkaawktttwgtktrgt

SEQ ID NO: 6029 - DNA, 23 bp, Artificial Sequence
  Primer
tagtgttrgagwargtrtaaaga

SEQ ID NO: 6030 - DNA, 19 bp, Artificial Sequence
  Primer
amttrgccatawtwaactt

SEQ ID NO: 6031 - DNA, 24 bp, Artificial Sequence
  Primer
actaawwwytrgytsktmmcytaa

SEQ ID NO: 6032 - DNA, 21 bp, Artificial Sequence
  Primer
twstcsgcaatkrcyycsgca

SEQ ID NO: 6033 - DNA, 20 bp, Artificial Sequence
  Primer
twstcsgcgtkrcyycsgca

SEQ ID NO: 6034 - DNA, 24 bp, Artificial Sequence
  Primer
gggttgggactatcctaagtgtga

SEQ ID NO: 6035 - DNA, 21 bp, Artificial Sequence
  Primer
  misc_feature 12: N is I (inosine)
taacacacaacnccatcatca

SEQ ID NO: 6036 - DNA, 21 bp, Artificial Sequence
  Primer
ctaacatgcttaggataatgg

SEQ ID NO: 6037 - DNA, 21 bp, Artificial Sequence
  Primer
gcctctcttgttcttgctcgc

SEQ ID NO: 6038 - DNA, 21 bp, Artificial Sequence
  Primer
caggtaagcgtaaaactcatc

SEQ ID NO: 6039 - protein, 4382 aa, SARS coronavirus
MESLVLGVNEKTHVQLSLPVLQVRDVLVRGFGDSVEEALSEAREHLKNGTCGLVELEKGVLPQLEQPYVFIKRSDALSTNHGHKVVELVAEMDGIQYGRSGITLGVLVPHVGETPIAYRNVLLRKNGNKGAGGHSYGIDLKSYDLGDELGTDPIEDYEQNWNTKHGSGALRELTRELNGGAVTRYVDNNFCGPDGYPLDCIKDFLARAGKSMCTLSEQLDYIESKRGVYCCRDHEHEIAWFTERSDKSYEHQTPFEIKSAKKFDTFKGECPKFVFPLNSKVKVIQPRVEKKKTEGFMGRIRSVYPVASPQECNNMHLSTLMKCNHCDEVSWQTCDFLKATCEHCGTENLVIEGPTTCGYLPTNAVVKMPCPACQDPEIGPEHSVADYHNHSNIETRLRKGGRTRCFGGCVFAYVGCYNKRAYWVPRASADIGSGHTGITGDNVETLNEDLLEILSRERVNINIVGDFHLNEEVAIILASFSASTSAFIDTIKSLDYKSFKTIVESCGNYKVTKGKPVKGAWNIGQQRSVLTPLCGFPSQAAGVIRSIFARTLDAANHSIPDLQRAAVTILDGISEQSLRLVDAMVYTSDLLTNSVIIMAYVTGGLVQQTSQWLSNLLGTTVEKLRPIFEWIEAKLSAGVEFLKDAWEILKFLITGVFDIVKGQIQVASDNIKDCVKCFIDVVNKALEMCIDQVTIAGAKLRSLNLGEVFIAQSKGLYRQCIRGKEQLQLLMPLKAPKEVTFLEGDSHDTVLTSEEVVLKNGELEALETPVDSFTNGAIVGTPVCVNGLMLLEIKDKEQYCALSPGLLATNNVFRLKGGAPIKGVTFGEDTVWEVQGYKNVRITFELDERVDKVLNEKCSVYTVESGTEVTEFACVVAEAVVKTLQPVSDLLTNMGIDLDEWSVATFYLFDDAGEENFSSRMYCSFYPPDEEEEDDAECEEEEIDETCEHEYGTEDDYQGLPLEFGASAETVRVEEEEEEDWLDDTTEQSEIEPEPEPTPEEPVNQFTGYLKLTDNVAIKCVDIVKEAQSANPMVIVNAANIHLKHGGGVAGALNKATNGAMQKESDDYIKLNGPLTVGGSCLLSGHNLAKKCLHVVGPNLNAGEDIQLLKAAYENFNSQDILLAPLLSAGIFGAKPLQSLQVCVQTVRTQVYIAVNDKALYEQVVMDYLDNLKPRVEAPKQEEPPNTEDSKTEEKSVVQKPVDVKPKIKACIDEVTTTLEETKFLTNKLLLFADINGKLYHDSQNMLRGEDMSFLEKDAPYMVGDVITSGDITCVVIPSKKAGGTTEMLSRALKKVPVDEYITTYPGQGCAGYTLEEAKTALKKCKSAFYVLPSEAPNAKEEILGTVSWNLREMLAHAEETRKLMPICMDVRAIMATIQRKYKGIKIQEGIVDYGVRFFFYTSKEPVASIITKLNSLNEPLVTMPIGYVTHGFNLEEAARCMRSLKAPAVVSVSSPDAVTTYNGYLTSSSKTSEEHFVETVSLAGSYRDWSYSGQRTELGVEFLKRGDKIVYHTLESPVEFHLDGEVLSLDKLKSLLSLREVKTIKVFTTVDNTNLHTQLVDMSMTYGQQFGPTYLDGADVTKIKPHVNHEGKTFFVLPSDDTLRSEAFEYYHTLDESFLGRYMSALNHTKKWKFPQVGGLTSIKWADNNCYLSSVLLALQQLEVKFNAPALQEAYYRARAGDAANFCALILAYSNKTVGELGDVRETMTHLLQHANLESAKRVLNVVCKHCGQKTTTLTGVEAVMYMGTLSYDNLKTGVSIPCVCGRDATQYLVQQESSFVMMSAPPAEYKLQQGTFLCANEYTGNYQCGHYTHITAKETLYRIDGAHLTKMSEYKGPVTDVFYKETSYTTTIKPVSYKLDGVTYTEIEPKLDGYYKKDNAYYTEQPIDLVPTQPLPNASFDNFKLTCSNTKFADDLNQMTGFTKPASRELSVTFFPDLNGDVVAIDYRHYSASFKKGAKLLHKPIVWHINQATTKTTFKPNTWCLRCLWSTKPVDTSNSFEVLAVEDTQGMDNLACESQQPTSEEVVENPTIQKEVIECDVKTTEVVGNVILKPSDEGVKVTQELGHEDLMAAYVENTSITIKKPNELSLALGLKTIATHGIAAINSVPWSKILAYVKPFLGQAAITTSNCAKRLAQRVFNNYMPYVFTLLFQLCTFTKSTNSRIRASLPTTIAKNSVKSVAKLCLDAGINYVKSPKFSKLFTIAMWLLLLSICLGSLICVTAAFGVLLSNFGAPSYCNGVRELYLNSSNVTTMDFCEGSFPCSICLSGLDSLDSYPALETIQVTISSYKLDLTILGLAAEWVLAYMLFTKFFYLLGLSAIMQVFFGYFASHFISNSWLMWFIISIVQMAPVSAMVRMYIFFASFYYIWKSYVHIMDGCTSSTCMMCYKRNRATRVECTTIVNGMKRSFYVYANGGRGFCKTHNWNCLNCDTFCTGSTFISDEVARDLSLQFKRPINPTDQSSYIVDSVAVKNGALHLYFDKAGQKTYERHPLSHFVNLDNLRANNTKGSLPINVIVFDGKSKCDESASKSASVYYSQLMCQPILLLDQALVSDVGDSTEVSVKMFDAYVDTFSATFSVPMEKLKALVATAHSELAKGVALDGVLSTFVSAARQGVVDTDVDTKDVIECLKLSHHSDLEVTGDSCNNFMLTYNKVENMTPRDLGACIDCNARHINAQVAKSHNVSLIWNVKDYMSLSEQLRKQIRSAAKKNNIPFRLTCATTRQVVNVITTKISLKGGKIVSTCFKLMLKATLLCVLAALVCYIVMPVHTLSIHDGYTNEIIGYKAIQDGVTRDIISTDDCFANKHAGFDAWFSQRGGSYKNDKSCPVVAAIITREIGFIVPGLPGTVLRAINGDFLHFLPRVFSAVGNICYTPSKLIEYSDFATSACVLAAECTIFKDAMGKPVPYCYDTNLLEGSISYSELRPDTRYVLMDGSIIQFPNTYLEGSVRVVTTFDAEYCRHGTCERSEVGICLSTSGRWVLNNEHYRALSGVFCGVDAMNLIANIFTPLVQPVGALDVSASVVAGGIIAILVTCAAYYFMKFRRVFGEYNHVVAANALLFLMSFTILCLVPAYSFLPGVYSVFYLYLTFYFTNDVSFLAHLQWFAMFSPIVPFWITAIYVFCISLKHCHWFFNNYLRKRVMFNGVTFSTFEEAALCTFLLNKEMYLKLRSETLLPLTQYNRYLALYNKYKYFSGALDTTSYREAACCHLAKALNDFSNSGADVLYQPPQTSITSAVLQSGFRKMAFPSGKVEGCMVQVTCGTTTLNGLWLDDTVYCPRHVICTAEDMLNPNYEDLLIRKSNHSFLVQAGNVQLRVIGHSMQNCLLRLKVDTSNPKTPKYKFVRIQPGQTFSVLACYNGSPSGVYQCAMRPNHTIKGSFLNGSCGSVGFNIDYDCVSFCYMHHMELPTGVHAGTDLEGKFYGPFVDRQTAQAAGTDTTITLNVLAWLYAAVINGDRWFLNRFTTTLNDFNLVAMKYNYEPLTQDHVDILGPLSAQTGIAVLDMCAALKELLQNGMNGRTILGSTILEDEFTPFDVVRQCSGVTFQGKFKKIVKGTHHWMLLTFLTSLLILVQSTQWSLFFFVYENAFLPFTLGIMAIAACAMLLVKHKHAFLCLFLLPSLATVAYFNMVYMPASWVMRIMTWLELADTSLSGYRLKDCVMYASALVLLILMTARTVYDDAARRVWTLMNVITLVYKVYYGNALDQAISMWALVISVTSNYSGVVTTIMFLARAIVFVCVEYYPLLFITGNTLQCIMLVYCFLGYCCCCYFGLFCLLNRYFRLTLGVYDYLVSTQEFRYMNSQGLLPPKSSIDAFKLNIKLLGIGGKPCIKVATVQSKMSDVKCTSVVLLSVLQQLRVESSSKLWAQCVQLHNDILLAKDTTEAFEKMVSLLSVLLSMQGAVDINRLCEEMLDNRATLQAIASEFSSLPSYAAYATAQEAYEQAVANGDSEVVLKKLKKSLNVAKSEFDRDAAMQRKLEKMADQAMTQMYKQARSEDKRAKVTSAMQTMLFTMLRKLDNDALNNIINNARDGCVPLNIIPLTTAAKLMVVVPDYGTYKNTCDGNTFTYASALWEIQQVVDADSKIVQLSEINMDNSPNLAWPLIVTALRANSAVKLQNNELSPVALRQMSCAAGTTQTACTDDNALAYYNNSKGGRFVLALLSDHQDLKWARFPKSDGTGTIYTELEPPCRFVTDTPKGPKVKYLYFIKGLNNLNRGMVLGSLAATVRLQAGNATEVPANSTVLSFCAFAVDPAKAYKDYLASGGQPITNCVKMLCTHTGTGQAITVTPEANMDQESFGGASCCLYCRCHIDHPNPKGFCDLKGKYVQIPTTCANDPVGFTLRNTVCTVCGMWKGYGCSCDQLREPLMQSADASTFLNGFAV

SEQ ID NO: 6040 - protein, 163 aa, SARS coronavirus
MNKTGTLSMAVVHSVNSLVSSMEVQSLAMSTTISVAQMGTLLIASKIFSHARASQCALFPNNLITSSRREVSTAAVTMSMKLPGSLSALIRATSTRHPSKLRVPRNLTLSKGNAQSLCFLLTQKSKSFNHVLKRKRLRVSWGVYALCTLLHLHRSVTICTCLP

SEQ ID NO: 6041 - protein, 2628 aa, SARS coronavirus
MSNYQHEETIYNLVKDCPAVAVHDFFKFRVDGDMVPHISRQRLTKYTMADLVYALRHFDEGNCDTLKEILVTYNCCDDDYFNKKDWYDFVENPDILRVYANLGERVRQSLLKTVQFCDAMRDAGIVGVLTLDNQDLNGNWYDFGDFVQVAPGCGVPIVDSYYSLLMPILTLTRALAAESHMDADLAKPLIKWDLLKYDFTEERLCLFDRYFKYWDQTYHPNCINCLDDRCILHCANFNVLFSTVFPPTSFGPLVRKIFVDGVPFVVSTGYHFRELGVVHNQDVNLHSSRLSFKELLVYAADPAMHAASGNLLLDKRTTCFSVAALTNNVAFQTVKPGNFNKDFYDFAVSKGFFKEGSSVELKHFFFAQDGNAAISDYDYYRYNLPTMCDIRQLLFVVEVVDKYFDCYDGGCINANQVIVNNLDKSAGFPFNKWGKARLYYDSMSYEDQDALFAYTKRNVIPTITQMNLKYAISAKNRARTVAGVSICSTMTNRQFHQKLLKSIAATRGATVVIGTSKFYGGWHNMLKTVYSDVETPHLMGWDYPKCDRAMPNMLRIMASLVLARKHNTCCNLSHRFYRLANECAQVLSEMVMCGGSLYVKPGGTSSGDATTAYANSVFNICQAVTANVNALLSTDGNKIADKYVRNLQHRLYECLYRNRDVDHEFVDEFYAYLRKHFSMMILSDDAVVCYNSNYAAQGLVASIKNFKAVLYYQNNVFMSEAKCWTETDLTKGPHEFCSQHTMLVKQGDDYVYLPYPDPSRILGAGCFVDDIVKTDGTLMIERFVSLAIDAYPLTKHPNQEYADVFHLYLQYIRKLHDELTGHMLDMYSVMLTNDNTSRYWEPEFYEAMYTPHTVLQAVGACVLCNSQTSLRCGACIRRPFLCCKCCYDHVISTSHKLVLSVNPYVCNAPGCDVTDVTQLYLGGMSYYCKSHKPPISFPLCANGQVFGLYKNTCVGSDNVTDFNAIATCDWTNAGDYILANTCTERLKLFAAETLKATEETFKLSYGIATVREVLSDRELHLSWEVGKPRPPLNRNYVFTGYRVTKNSKVQIGEYTFEKGDYGDAVVYRGTTTYKLNVGDYFVLTSHTVMPLSAPTLVPQEHYVRITGLYPTLNISDEFSSNVANYQKVGMQKYSTLQGPPGTGKSHFAIGLALYYPSARIVYTACSHAAVDALCEKALKYLPIDKCSRIIPARARVECFDKFKVNSTLEQYVFCTVNALPETTADIVVFDEISMATNYDLSVVNARLRAKHYVYIGDPAQLPAPRTLLTKGTLEPEYFNSVCRLMKTIGPDMFLGTCRRCPAEIVDTVSALVYDNKLKAHKDKSAQCFKMFYKGVITHDVSSAINRPQIGVVREFLTRNPAWRKAVFISPYNSQNAVASKILGLPTQTVDSSQGSEYDYVIFTQTTETAHSCNVNRFNVAITRAKIGILCIMSDRDLYDKLQFTSLEIPRRNVATLQAENVTGLFKDCSKIITGLHPTQAPTHLSVDIKFKTEGLCVDIPGIPKDMTYRRLISMMGFKMNYQVNGYPNMFITREEAIRHVRAWIGFDVEGCHATRDAVGTNLPLQLGFSTGVNLVAVPTGYVDTENNTEFTRVNAKPPPGDQFKHLIPLMYKGLPWNVVRIKIVQMLSDTLKGLSDRVVFVLWAHGFELTSMKYFVKIGPERTCCLCDKRATCFSTSSDTYACWNHSVGFDYVYNPFMIDVQQWGFTGNLQSNHDQHCQVHGNAHVASCDAIMTRCLAVHECFVKRVDWSVEYPIIGDELRVNSACRKVQHMVVKSALLADKFPVLHDIGNPKAIKCVPQAEVEWKFYDAQPCSDKAYKIEELFYSYATHHDKFTDGVCLFWNCNVDRYPANAIVCRFDTRVLSNLNLPGCDGGSLYVNKHAFHTPAFDKSAFTNLKQLPFFYYSDSPCESHGKQVVSDIDYVPLKSATCITRCNLGGAVCRHHANEYRQYLDAYNMMISAGFSLWIYKQFDTYNLWNTFTRLQSLENVAYNVVNKGHFDGHAGEAPVSIINNAVYTKVDGIDVEIFENKTTLPVNVAFELWAKRNIKPVPEIKILNNLGVDIAANTVIWDYKREAPAHVSTIGVCTMTDIAKKPTESACSSLTVLFDGRVEGQVDLFRNARNGVLITEGSVKGLTPSKGPAQASVNGVTLIGESVKTQFNYFKKVDGIIQQLPETYFTQSRDLEDFKPRSQMETDFLELAMDEFIQRYKLEGYAFEHIVYGDFSHGQLGGLHLMIGLAKRSQDSPLKLEDFIPMDSTVKNYFITDAQTGSSKCVCSVIDLLLDDFVEIIKSQDLSVISKVVKVTIDYAEISFMLWCKDGHVETFYPKLQASRAWQPGVAMPNLYKMQRMLLEKCDLQNYGENAVIPKGIMMNVAKYTQLCQYLNTLTLAVPYNMRVIHFGAGSDKGVAPGTAVLRQWLPTGTLLVDSDLNDFVSDAYSTLIGDCATVHTANKWDLIISDMYDPRTKHVTKENDSKEGFFTYLCGFIKQKLALGGSIAVKITEHSWNADLYKLMGHFSWWTAFVTNVNASSSEAFLIGANYLGKPKEQIDGYTMHANYIFWRNTNPIQLSSYSLFDMSKFPLKLRGTAVMSLKENQINDMIYSLLEKGRLIIRENNRVVVSSDILVNN

SEQ ID NO: 6042 - protein, 1255 aa, SARS coronavirus
MFIFLLFLTLTSGSDLDRCTTFDDVQAPNYTQHTSSMRGVYYPDEIFRSDTLYLTQDLFLPFYSNVTGFHTINHTFGNPVIPFKDGIYFAATEKSNVVRGWVFGSTMNNKSQSVIIINNSTNVVIRACNFELCDNPFFAVSKPMGTQTHTMIFDNAFNCTFEYISDAFSLDVSEKSGNFKHLREFVFKNKDGFLYVYKGYQPIDVVRDLPSGFNTLKPIFKLPLGINITNFRAILTAFSPAQDIWGTSAAAYFVGYLKPTTFMLKYDENGTITDAVDCSQNPLAELKCSVKSFEIDKGIYQTSNFRVVPSGDVVRFPNITNLCPFGEVFNATKFPSVYAWERKKISNCVADYSVLYNSTFFSTFKCYGVSATKLNDLCFSNVYADSFVVKGDDVRQIAPGQTGVIADYNYKLPDDFMGCVLAWNTRNIDATSTGNYNYKYRYLRHGKLRPFERDISNVPFSPDGKPCTPPALNCYWPLNDYGFYTTTGIGYQPYRVVVLSFELLNAPATVCGPKLSTDLIKNQCVNFNFNGLTGTGVLTPSSKRFQPFQQFGRDVSDFTDSVRDPKTSEILDISPCAFGGVSVITPGTNASSEVAVLYQDVNCTDVSTAIHADQLTPAWRIYSTGNNVFQTQAGCLIGAEHVDTSYECDIPIGAGICASYHTVSLLRSTSQKSIVAYTMSLGADSSIAYSNNTIAIPTNFSISITTEVMPVSMAKTSVDCNMYICGDSTECANLLLQYGSFCTQLNRALSGIAAEQDRNTREVFAQVKQMYKTPTLKYFGGFNFSQILPDPLKPTKRSFIEDLLFNKVTLADAGFMKQYGECLGDINARDLICAQKFNGLTVLPPLLTDDMIAAYTAALVSGTATAGWTFGAGAALQIPFAMQMAYRFNGIGVTQNVLYENQKQIANQFNKAISQIQESLTTTSTALGKLQDVVNQNAQALNTLVKQLSSNFGAISSVLNDILSRLDKVEAEVQIDRLITGRLQSLQTYVTQQLIRAAEIRASANLAATKMSECVLGQSKRVDFCGKGYHLMSFPQAAPHGVVFLHVTYVPSQERNFTTAPAICHEGKAYFPREGVFVFNGTSWFITQRNFFSPQIITTDNTFVSGNCDVVIGIINNTVYDPLQPELDSFKEELDKYFKNHTSPDVDLGDISGINASVVNIQKEIDRLNEVAKNLNESLIDLQELGKYEQYIKWPWYVWLGFIAGLIAIVMVTILLCCMTSCCSCLKGACSCGSCCKFDEDDSEPVLKGVKLHYT

SEQ ID NO: 6043 - protein, 274 aa, SARS coronavirus
MDLFMRFFTLGSITAQPVKIDNASPASTVHATATIPLQASLPFGWLVIGVAFLAVFQSATKIIALNKRWQLALYKGFQFICNLLLLFVTIYSHLLLVAAGMEAQFLYLYALIYFLQCINACRIIMRCWLCWKCKSKNPLLYDANYFVCWHTHNYDYCIPYNSVTDTIVVTEGDGISTPKLKEDYQIGGYSEDRHSGVKDYVVVHGYFTEVYYQLESTQITTDTGIENATFFIFNKLVKDPPNVQIHTIDGSSGVANPAMDPIYDEPTTTTSVPL

SEQ ID NO: 6044 - protein, 154 aa, SARS coronavirus
MMPTTLFAGTHITMTTVYHITVSQIQLSLLKVTAFQHQNSKKTTKLVVILRIGTQVLKTMSLYMAISPKFTTSLSLHKLLQTLVLKMLHSSSLTSLLKTHRMCKYTQSTALQELLIQQWIQFMMSRRRLLACLCKHKKVSTNLCTHSFRKKQVR

SEQ ID NO: 6045 - protein, 76 aa, SARS coronavirus
MYSFVSEETGTLIVNSVLLFLAFVVFLLVTLAILTALRLCAYCCNIVNVSLVKPTVYVYSRVKNLNSSEGVPDLLV

SEQ ID NO: 6046 - protein, 221 aa, SARS coronavirus
MADNGTITVEELKQLLEQWNLVIGFLFLAWIMLLQFAYSNRNRFLYIIKLVFLWLLWPVTLACFVLAAVYRINWVTGGIAIAMACIVGLMWLSYFVASFRLFARTRSMWSFNPETNILLNVPLRGTIVTRPLMESELVIGAVIIRGHLRMAGHSLGRCDIKDLPKEITVATSRTLSYYKLGASQRVGTDSGFAAYNRYRIGNYKLNTDHAGSNDNIALLVQ

SEQ ID NO: 6047 - protein, 63 aa, SARS coronavirus
MFHLVDFQVTIAEILIIIMRTFRIAIWNLDVIISSIVRQLFKPLTKKNYSELDDEEPMELDYP

SEQ ID NO: 6048 - protein, 122 aa, SARS coronavirus
MKIILFLTLIVFTSCELYHYQECVRGTTVLLKEPCPSGTYEGNSPFHPLADNKFALTCTSTHFAFACADGTRHTYQLRARSVSPKLFIRQEEVQQELYSPLFLIVAALVFLILCFTIKRKTE

SEQ ID NO: 6049 - protein, 44 aa, SARS coronavirus
MNELTLIDFYLCFLAFLLFLVLIMLIIFWFSLEIQDLEEPCTKV

SEQ ID NO: 6050 - protein, 84 aa, SARS coronavirus
MCLKILVRYNTRGNTYSTAWLCALGKVLPFHRWHTMVQTCTPNVTINCQDPAGGALIARCWYLHEGHQTAAFRDVLVVLNKRTN

SEQ ID NO: 6051 - protein, 399 aa, SARS coronavirus
MSDNGPQSNQRSAPRITFGGPTDSTDNNQNGGRNGARPKQRRPQGLPNNTASWFTALTQHGKEELRFPRGQGVPINTNSGPDDQIGYYRRATRRVRGGDGKMKELSPRWYFYYLGTGPEASLPYGANKEGIVWVATEGALNTPKDHIGTRNPNNNAATVLQLPQGTTLPKGFYAEGSRGGSQASSRSSSRSRGNSRNSTPGSSRGNSPARMASGGGETALALLLLDRLNQLESKVSGKGQQQQGQTVTKKSAAEASKKPRQKRTATKQYNVTQAFGRRGPEQTQGNFGDQDLIRQGTDYKHWPQIAQFAPSASAFFGMSRIGMEVTPSGTWLTYHGAIKLDDKDPQFKDNVILLNKHIDAYKTFPPTEPKKDKKKKTDEAQPLPQRQKKQPTVTLLPAA

SEQ ID NO: 6052 - protein, 422 aa, SARS coronavirus
MSDNGPQSNQRSAPRITFGGPTDSTDNNQNGGRNGARPKQRRPQGLPNNTASWFTALTQHGKEELRFPRGQGVPINTNSGPDDQIGYYRRATRRVRGGDGKMKELSPRWYFYYLGTGPEASLPYGANKEGIVWVATEGALNTPKDHIGTRNPNNNAATVLQLPQGTTLPKGFYAEGSRGGSQASSRSSSRSRGNSRNSTPGSSRGNSPARMASGGGETALALLLLDRLNQLESKVSGKGQQQQGQTVTKKSAAEASKKPRQKRTATKQYNVTQAFGRRGPEQTQGNFGDQDLIRQGTDYKHWPQIAQFAPSASAFFGMSRIGMEVTPSGTWLTYHGAIKLDDKDPQFKDNVILLNKHIDAYKTFPPTEPKKDKKKKTDEAQPLPQRQKKQPTVTLLPAADMDDFSRQLQNSMSGASADSTQA

SEQ ID NO: 6053 - protein, 1173 aa, 229E human coronavirus
MFVLLVAYALLHIAGCQTTNGLNTSYSVCNGCVGYSENVFAVESGGYIPSDFAFNNWFLLTNTSSVVDGVVRSFQPLLLNCLWSVSGLRFTTGFVYFNGTGRGDCKGFSSDVLSDVIRYNLNFEENLRRGTILFKTSYGVVVFYCTNNTLVSGDAHIPFGTVLGNFYCFVNTTIGNETTSAFVGALPKTVREFVISRTGHFYINGYRYFTLGNVEAVNFNVTTAETTDFCTVALASYADVLVNVSQTSIANIIYCNSVINRLRCDQLSFDVPDGFYSTSPIQSVELPVSIVSLPVYHKHTFIVLYVDFKPQSGGGKCFNCYPAGVNITLANFNETKGPLCVDTSHFTTKYVAVYANVGRWSASINTGNCPFSFGKVNNFVKFGSVCFSLKDIPGGCAMPIVANWAYSKYYTIGSLYVSWSDGDGITGVPQPVEGVSSFMNVTLDKCTKYNIYDVSGVGVIRVSNDTFLNGITYTSTSGNLLGFKDVTKGTIYSITPCNPPDQLVVYQQAVVGAMLSENFTSYGFSNVVELPKFFYASNGTYNCTDAVLTYSSFGVCADGSIIAVQPRNVSYDSVSAIVTANLSIPSNWTTSVQVEYLQITSTPIVVDCSTYVCNGNVRCVELLKQYTSACKTIEDALRNSARLESADVSEMLTFDKKAFTLANVSSFGDYNLSSVIPSLPTSGSRVAGRSAIEDILFSKLVTSGLGTVDADYKKCTKGLSIADLACAQYYNGIMVLPGVADAERMAMYTGSLIGGIALGGLTSAVSIPFSLAIQARLNYVALQTDVLQENQKILAASFNKAMTNIVDAFTGVNDAITQTSQALQTVATALNKIQDVVNQQGNSLNHLTSQLRQNFQAISSSIQAIYDRLDTIQADQQVDRLITGRLAALNVFVSHTLTKYTEVRASRQLAQQKVNECVKSQSKRYGFCGNGTHIFSIVNAAPEGLVFLHTVLLPTQYKDVEAWSGLCVDGTNGYVLRQPNLALYKEGNYYRITSRIMFEPRIPTMADFVQIENCNVTFVNISRSELQTIVPEYIDVNKTLQELSYKLPNYTVPDLVVEQYNQTILNLTSEISTLENKSAELNYTVQKLQTLIDNINSTLVDLKWLNRVETYIKWPWWVWLCISVVLIFVVSMLLLCCCSTGCCGFFSCFASSIRGCCESTKLPYYDVEKIHIQ

SEQ ID NO: 6054 - protein, 77 aa, 229E human coronavirus
MFLKLVDDHALVVNVLLWCVVLIVILLVCITIIKLIKLCFTCHMFCNRTVYGPIKNVYHIYQSYMHIDPFPKRVIDF

SEQ ID NO: 6055 - protein, 225 aa, 229E human coronavirus
MSNDNCTGDIVTHLKNWNFGWNVILTIFIVILQFGHYKYSRLFYGLKMLVLWLLWPLVLALSIFDTWANWDSNWAFVAFSFFMAVSTLVMWVMYFANSFRLFRRARTFWAWNPEVNAITVTTVLGQTYYQPIQQAPTGITVTLLSGVLYVDGHRLASGVQVHNLPEYMTVAVPSTTIIYSRVGRSVNSQNSTGWVFYVRVKHGDFSAVSSPMSNMTENERLLHFF

SEQ ID NO: 6056 - protein, 389 aa, 229E human coronavirus
MATVKWADASEPQRGRQGRIPYSLYSPLLVDSEQPWKVIPRNLVPINKKDKNKLIGYWNVQKRFRTRKGKRVDLSPKLHFYYLGTGPHKDAKFRERVEGVVWVAVDGAKTEPTGYGVRRKNSEPEIPHFNQKLPNGVTVVEEPDSRAPSRSQSRSQSRGRGESKPQSRNPSSDRNHNSQDDIMKAVAAALKSLGFDKPQEKDKKSAKTGTPKPSRNQSPASSQTSAKSLARSQSSETKEQKHEMQKPRWKRQPNDDVTSNVTQCFGPRDLDHNFGSAGVVANGVKAKGYPQFAELVPSTAAMLFDSHIVSKESGNTVVLTFTTRVTVPKDHPHLGKFLEELNAFTREMQQHPLLNPSALEFNPSQTSPATAEPVRDEVSIETDIIDEVN

SEQ ID NO: 6057 - protein, 1447 aa, Transmissible gastroenteritis virus
MKKLFVVLVVMPLIYGDNFPCSKLTNRTIGNQWNLIETFLLNYSSRLPPNSDVVLGDYFPTVQPWFNCIRNDSNDLYVTLENLKALYWDYATENITWNHRQRLNVVVNGYPYSITVTTTRNFNSAEGAIICICKGSPPTTTTESSLTCNWGSECRLNHKFPICPSNSEANCGNMLYGLQWFADEVVAYLHGASYRISFENQWSGTVTFGDMRATTLEVAGTLVDLWWFNPVYDVSYYRVNNKNGTTVVSNCTDQCASYVANVFTTQPGGFIPSDFSFNNWFLLTNSSTLVSGKLVTKQPLLVNCLWPVPSFEEAASTFCFEGAGFDQCNGAVLNNTVDVIRFNLNFTTNVQSGKGATVFSLNTTGGVTLEISCYTVSDSSFFSYGEIPFGVTDGPRYCYVHYNGTALKYLGTLPPSVKEIAISKWGHFYINGYNFFSTFPIDCISFNLTTGDSDVFWTIAYTSYTEALVQVENTAITKVTYCNSHVNNIKCSQITANLNNGFYPVSSSEVGLVNKSVVLLPSFYTHTIVNITIGLGMKRSGYGQPIASTLSNITLPMQDHNTDVYCIRSDQFSVYVHSTCKSALWDNIFKRNCTDVLDATAVIKTGTCPFSFDKLNNYLTFNKFCLSLSPVGANCKFDVAARTRTNEQVVRSLYVIYEEGDNIVGVPSDNSGVHDLSVLHLDSCTDYNIYGRTGVGIIRQTNRTLLSGLYYTSLSGDLLGFKNVSDGVIYSVTPCDVSAQAAVIDGTIVGAITSINSELLGLTHWTTTPNFYYYSIYNYTNDRTRGTAIDSNDVDCEPVITYSNIGVCKNGAFVFINVTHSDGDVQPISTGNVTIPTNFTISVQVEYIQVYTTPVSIDCSRYVCNGNPRCNKLLTQYVSACQTIEQALAMGARLENMEVDSMLFVSENALKLASVEAFNSSETLDPIYKEWPNIGGSWLEGLKYILPSHNSKRKYRSAIEDLLFDKVVTSGLGTVDEDYKRCTGGYDIADLVCAQYYNGIMVLPGVANADKMTMYTASLAGGITLGALGGGAVAIPFAVAVQARLNYVALQTDVLNKNQQILASAFNQAIGNITQSFGKVNDAIHQTSRGLATVAKALAKVQDVVNIQGQALSHLTVQLQNNFQAISSSISDIYNRLDELSADAQVDRLITGRLTALNAFVSQTLTRQAEVRASRQLAKDKVNECVRSQSQRFGFCGNGTHLFSLANAAPNGMIFFHTVLLPTAYETVTAWPGICASDGDRTFGLVVKDVQLTLFRNLDDKFYLTPRTMYQPRVATSSDFVQIEGCDVLFVNATVSDLPSIIPDYIDINQTVQDILENFRPNWTVPELTFDIFNATYLNLTGEIDDLEFRSEKLHNTTVELAILIDNINNTLVNLEWLNRIETYVKWPWYVWLLIGLVVIFCIPLLLFCCCSTGCCGCIGCLGSCCHSICSRRQFENYEPIEKVHVH

SEQ ID NO: 6058 - protein, 82 aa, Transmissible gastroenteritis virus
MTFPRALTVIDDNGMVINIIFWFLLIIILILLSIALLNIIKLCMVCCNLGRTVIIVPAQHAYDAYKNFMRIKAYNPDGALLA

SEQ ID NO: 6059 - protein, 262 aa, Transmissible gastroenteritis virus
MKILLILACVIACACGERYCAMKSDTDLSCRNSTASDCESCFNGGDLIWHLANWNFSWSIILIVFITVLQYGRPQFSWFVYGIKMLIMWLLWPVVLALTIFNAYSEYQVSRYVMFGFSIAGAIVTFVLWIMYFVRSIQLYRRTKSWWSFNPETKAILCVSALGRSYVLPLEGVPTGVTLTLLSGNLYAEGFKIAGGMNIDNLPKYVMVALPSRTIVYTLVGKKLKASSATGWAYYVKSKAGDYSTEARTDNLSEQEKLLHMV

SEQ ID NO: 6060 - protein, 382 aa, Transmissible gastroenteritis virus
MANQGQRVSWGDESTKTRGRSNSRGRKNNNIPLSFFNPITLQQGSKFWNLCPRDFVPKGIGNRDQQIGYWNRQTRYRMVKGQRKELPERWFFYYLGTGPHADAKFKDKLDGVVWVAKDGAMNKPTTLGSRGANNESKALKFDGKVPGEFQLEVNQSRDNSRSRSQSRSRSRNRSQSRGRQQFNNKKDDSVEQAVLAALKKLGVDTEKQQQRSRSKSKERSNSKTRDTTPKNENKHTWKRTAGKGDVTRFYGARSSSANFGDTDLVANGSSAKHYPQLAECVPSVSSILFGSYWTSKEDGDQIEVTFTHKYHLPKDDPKTGQFLQQINAYARPSEVAKEQRKRKSRSKSAERSEQDVVPDALIENYTDVFDDTQVEIIDEVTN

SEQ ID NO: 6061 - protein, 1383 aa, Porcine epidemic diarrhea virus
MRSLIYFWLLLPVLPTLSLPQDVTRCQSTTNFRRFFSKFNVQAPAVVVLGGYLPSMNSSSWYCGTGIETASGVHGIFLSYIDSGQGFEIGISQEPFDPSGYQLYLHKATNGNTNAIARLRICQFPDNKTLGPTVNDVTTGRNCLFNKAIPAYMRDGKDIVVGITWDNDRVTVFADKIYHFYLKNDWSRVATRCYNRRSCAMQYVYTPTYYMLNVTSAGEDGIYYEPCTANCTGYAANVFATDSNGHIPEGFSFNNWFLLSNDSTLLHGKVVSNQPLLVNCLLAIPKIYGLGQFFSFNHTMDGVCNGAAVDRAPEALRFNINDTSVILAEGSIVLHTALGTNLSFVCSNSSDPHLAIFAIPLGATEVPYYCFLKVDTYNSTVYKFLAVLPPTVREIVITKYGDVYVNGFGYLHLGLLDAVTINFTGHGTDDDVSGFWTIASTNFVDALIEVQGTSIQRILYCDDPVSQLKCSQVAFDLDDGFYPISSRNLLSHEQPISFVTLPSFNDHSFVNITVSAAFGGLSSANLVASDTTINGFSSFCVDTRQFTITLFYNVTNSYGYVSKSQDSNCPFTLQSVNDYLSFSKFCVSTSLLAGACTIDLFGYPAFGSGVKLTSLYFQFTKGELITGTPKPLEGITDVSFMTLDVCTKYTIYGFKGEGIITLTNSSILAGVYYTSDSGQLLAFKNVTSGAVYSVTPCSFSEQAAYVNDDIVGVISSLSNSTFNNTRELPGFFYHSNDGSNCTEPVLVYSNIGVCKSGSIGYVPSQYGQVKIAPTVTGNISIPTNFSMSIRTEYLQLYNTPVSVDCATYVCNGNSRCKQLLTQYTAACKTIESALQLSARLESVEVNSMLTISEEALQLATISSFNGDGYNFTNVLGASVYDPASGRVVQKRSVIEDLLFNKVVTNGLGTVDEDYKRCSNGRSVADLVCAQYYSGVMVLPGVVDAEKLHMYSASLIGGMALGGITAAAALPFSYAVQARLNYLALQTDVLQRNQQLLAESFNSAIGNITSAFESVKEAISQTSKGLNTVAHALTKVQEVVNSQGSALNQLTVQLQHNFQAISSSIDDIYSRLDILSADVQVDRLITGRLSALNAFVAQTLTKYTEVQASRKLAQQKVNECVKSQSQRYGFCGGDGEHIFSLVQAAPQGLLFLHTVLVPGDFVNVLAIAGLCVNGEIALTLREPGLVLFTHELQTYTATEYFVSSRRMFEPRKPTVSDFVQIESCVVTYVNLTSDQLPDVIPDYIDVNKTLDEILASLPNRTGPSLPLDVFNATYLNLTGEIADLEQRSESLRNTTEELRSLINNINNTLVDLEWLNRVETYIKWPWWVWLIIVIVLIFVVSLLVFCCISTGCCGCCGCCGACFSGCCRGPRLQPYEAFEKVHVQ

SEQ ID NO: 6062 - protein, 76 aa, Porcine epidemic diarrhea virus
MLQLVNDNGLVVNVILWLFVLFFLLIISITFVQLVNLCFTCHRLCNSAVYTPIGRLYRVYKSYMRIDPLPSTVIDV

SEQ ID NO: 6063 - protein, 226 aa, Porcine epidemic diarrhea virus
MSNGSIPVDEVIEHLRNWNFTWNIILTILLVVLQYGHYKYSVFLYGVKMAILWILWPLVLALSLFDAWASFQVNWVFFAFSILMACITLMLWIMYFVNSIRLWRRTHSWWSFNPETDALLTTSVMGRQVCIPVLGAPTGVTLTLLSGTLLVEGYKVATGVQVSQLPNFVTVAKATTTIVYGRVGRSVNASSGTGWAFYVRSKHGDYSAVSNPSAVLTDSEKVLHLV

SEQ ID NO: 6064 - protein, 441 aa, Porcine epidemic diarrhea virus
MASVSFQDRGRKRVPLSLYAPLRVTNDKPLSKVLANNAVPTNKGNKDQQIGYWNEQIRWRMRRGERIEQPSNWHFYYLGTGPHGDLRYRTRTEGVFWVAKEGAKTEPTNLGVRKASEKPIIPKFSQQLPSVVEIVEPNTPPASRANSRSRSRGNGNNRSRSPSNNRGNNQSRGNSQNRGNNQGRGASQNRGGNNNNNNKSRNQSNNRNQSNDRGGVTSRDDLVAAVKDALKSLGIGENPDRHKQQQKPKQEKSDNSGKNTPKKNKSRATSKERDLKDIPEWRRIPKGENSVAACFGPRGGFKNFGDAEFVEKGVDASGYAQIASLAPNVAALLFGGNVAVRELADSYEITYNYKMTVPKSDPNVELLVSQVDAFKTGNAKLQRKKEKKNKRETTLQQHEEAIYDDVGAPSDVTHANLEWDTAVDGGDTAVEIINEIFDTGN

SEQ ID NO: 6065 - protein, 1363 aa, Bovine coronavirus
MFLILLISLPTAFAVIGDLKCTTVSINDVDTGVPSISTDTVDVTNGLGTYYVLDRVYLNTTLLLNGYYPTSGSTYRNMALKGTLLLSTLWFKPPFLSDFTNGIFAKVKNTKVIKDGVMYSEFPAITIGSTFVNTSYSVVVQPHTTILGNKLQGFLEISVCQYTMCEYPNTICNPNLGNQRVELWHWDTGVVSCLYKRNFTYDVNADYLYFHFYQEGGTFYAYFTDTGVVTKFLFNVYLGTVLSHYYVMPLTCNSALTLEYWVTPLTSKQYLLAFNQDGVIFNAVDCKSDFMSEIKCKTLSIAPSTGVYELNGYTVQPIADVYRRIPNLPDCNIEAWLNDKSVPSPLNWERKTFSNCNFNMSSLMSFIQAYSFTCNNIDAAKIYGMCFSSITIDKFAIPNGRKVDLQLGNLGYLQSFNYRIDTTATSCQLYYNLPAANVSVSRFNPSTWNRRFGFTEQSVFKPQPAGVFTDHDVVYAQHCFKASTNFCPCKLDGSLCVGNGPGIDAGYKTSGIGTCPAGTNYLTCHNAAQCDCLCTPDPITSKATGPYKCPQTKYLVGIGEHCSGLAIKSDHCGGNPCTCQPQAFLGWSVDSCLQGDRCNIFANFILHDVNSGTTCSTDLQKSNTDIILGVCVNYDLYGITGQGIFVEVNATYYNSWQNLLYDSNGNLYGFRDYLTNRTFMIRSCYSGRVSAAFHANSSEPALLFRNIKCNYVFNNTLSRQLQPINYFDSYLGCVVNADNSTSSVVQTCDLTVGSGYCVDYSTKRRSRRSITTGYRFTNFEPFTVNSVNDSLEPVGGLYEIQIPSEFTIGNMEEFIQTSSPKVTIDCSAFVCGDYAACKSQLVEYGSFCDNINAILTEVNELLDTTQLQVANSLMNGVTLSTKLKDGVNFNVDDINFSPVLGCLGSDCNKVSSRSAIEDLLFSKVKLSDVGFVEAYNNCTGGAEIRDLICVQSYNGIKVLPPLLSENQISGYTLAATSASLFPPWSAAAGVPFYLNVQYRINGIGVTMDVLSQNQKLIANAFNNALGAIQEGFDATNSALVKIQAVVNANAEALNNLLQQLSNRFGAISSSLQEILSRLDALEAQAQIDRLINGRLTALNAYVSQQLSDSTLVKFSAAQAMEKVNECVKSQSSRINFCGNGNHIISLVQNAPYGLYFIHFSYVPTKYVTAKVSPGLCIAGDRGIAPKSGYFVNVNNTWMFTGSGYYYPEPITGNNVVVMSTCAVNYTKAPDVMLNISTPNLPYFKEELDQWFKNQTSVAPDLSLDYINVTFLDLQDEMNRLQEAIKVLNQSYINLKDIGTYEYYVKWPWYVWLLIGFAGVAMLVLLFFICCCTGCGTSCFKKCGGCCDDYTGHQELVIKTSHED

SEQ ID NO: 6066 - protein, 84 aa, Bovine coronavirus
MFMADAYFADTVWYVGQIIFIVAICLLVIIVVVAFLATFKLCIQLCGMCNTLVLSPSIYVFNRGRQFYEFYNDVKPPVLDVDDV

SEQ ID NO: 6067 - protein, 230 aa, Bovine coronavirus
MSSVTTPAPVYTWTADEAIKFLKEWNFSLGIILLFITVILQFGYTSRSMFVYVIKMVILWLMWPLTIILTIFNCVYALNNVYLGFSIVFTIVAIIMWIVYFVNSIRLFIRTGSWWSFNPETNNLMCIDMKGRMYVRPIIEDYHTLTVTIIRGHLYMQGIKLGTGYSLSDLPAYVTVAKVSHLLTYKRGFLDKIGDTSGFAVYVKSKVGNYRLPSTQKGSGLDTALLRNNI

SEQ ID NO: 6068 - protein, 448 aa, Bovine coronavirus
MSFTPGKQSSSRASSGNRSGNGILKWADQSDQSRNVQTRGRRAQPKQTATSQQPSGGNVVPYYSWFSGITQFQKGKEFEFAEGQGVPIAPGVPATEAKGYWYRHNRRSFKTADGNQRQLLPRWYFYYLGTGPHAKDQYGTDIDGVYWVASNQADVNTPADILDRDPSSDEAIPTRFPPGTVLPQGYYIEGSGRSAPNSRSTSRASSRASSAGSRSRANSGNRTPTSGVTPDMADQIASLVLAKLGKDAAKPQQVTKQTAKEIRQKILNKPRQKRSPNKQCTVQQCFGKRGPNQNFGGGEMLKLGTSDPQFPILAELAPTAGAFFFGSRLELAKVQNLSGNLDEPQKDVYELRYNGAIRFDSTLSGFETIMKVLNENLNAYQQQDGTMNMSPKPQRQRGQKNGQGENDNISVAAPKSRVQQNKIRELTAEDISLLKKMDEPFTEDTSEI

SEQ ID NO: 6069 - protein, 1324 aa, Murine hepatitis virus
MLFVFILFLPSCLGYIGDFRCIQLVNSNGANVSAPSISTETVEVSQGLGTYYVLDRVYLNATLLLTGYYPVDGSKFRNLALTGTNSVSLSWFQPPYLSQFNDGIFAKVQNLKTSTPSGATAYFPTIVIGSLFGYTSYTVVIEPYNGVIMASVCQYTICLLPYTDCKPNTNGNKLIGFWHTDVKPPICVLKRNFTLNVNADAFYFHFYQHGGTFYAYYADKPSATTFLFSVYIGDILTQYYVLPFICNPTAGSTFAPRYWVTPLVKRQYLFNFNQKGVITSAVDCASSYTSEIKCKTQSMLPSTGVYELSGYTVQPVGVVYRRVANLPACNIEEWLTARSVPSPLNWERKTFQNCNFNLSSLLRYVQAESLFCNNIDASKVYGRCFGSISVDKFAVPRSRQVDLQLGNSGFLQTANYKIDTAATSCQLHYTLPKNNVTINNHNPSSWNRRYGFNDAGVFGKNQHDVVYAQQCFTVRSSYCPCAQPDIVSPCTTQTKPKSAFVNVGDHCEGLGVLEDNCGNADPHKGCICANNSFIGWSHDTCLVNDRCQIFANILLNGINSGTTCSTDLQLPNTEVVTGICVKYDLYGITGQGVFKEVKADYYNSWQTLLYDVNGNLNGFRDLTTNKTYTIRSCYSGRVSAAFHKDAPEPALLYRNINCSYVFSNNISREENPLNYFDSYLGCVVNADNRTDEALPNCDLRMGAGLCVDYSKSRRADRSVSTGYRLTTFEPYTPMLVNDSVQSVDGLYEMQIPTNFTIGHHEEFIQTRSPKVTIDCAAFVCGDNTACRQQLVEYGSFCVNVNAILNEVNNLLDNMQLQVASALMQGVTISSRLPDGISGPIDDINFSPLLGCIGSTCAEDGNGPSAIRGRSAIEDLLFDKVKLSDVGFVEAYNNCTGGQEVRDLLCVQSFNGIKVLPPVLSESQISGYTTGATAAAMFPPWSAAAGVPFSLSVQYRINGLGVTMNVLSENQKMIASAFNNALGAIQDGFDATNSALGKIQSVVNANAEALNNLLNQLSNRFGAISASLQEILTRLEAVEAKAQIDRLINGRLTALNAYISKQLSDSTLIKVSAAQAIEKVNECVKSQTTRINFCGNGNHILSLVQNAPYGLYFIHFSYVPISFTTANVSPGLCISGDRGLAPKAGYFVQDDGEWKFTGSSYYYPEPITDKNSVIMSSCAVNYTKAPEVFLNTSIPNPPDFKEELDKWFKNQTSIAPDLSLDFEKLNVTLLDLTYEMNRIQDAIKKLNESYINLKEVGTYEMYVKWPWYVWLLIGLAGVAVCVLLFFICCCTGCGSCCFKKCGNCCDEYGGHQDSIVIHNISSHED

SEQ ID NO: 6070 - protein, 228 aa, Murine hepatitis virus
MSSTTQAPEPVYQWTADEAVQFLKEWNFSLGIILLFITIILQFGYTSRSMFIYVVKMIILWLMWPLTIVLCIFNCVYALNNVYLGFSIVFTIVSIVIWIMYFVNSIRLFIRTGSWWSFNPETNNLMCIDMKGTVYVRPIIEDYHTLTATIIRGHLYMQGVKLGTGFSLSDLPAYVTVAKVSHLCTYKRAFLDKVDGVSGFAVYVKSKVGNYRLPSNKPSGADTALLRI

SEQ ID NO: 6071 - protein, 454 aa, Murine hepatitis virus
MSFVPGQENAGGRSSSVNRAGNGILKKTTWADQTERGPNNQNRGRRNQPKQTATTQPNSGSVVPHYSWFSGITQFQKGKEFQFAEGQGVPIANGIPASEQKGYWYRHNRRSFKTPDGQQKQLLPRWYFYYLGTGPHAGASYGDSIEGVFWVANSQADTNTRSDIVERDPSSHEAIPTRFAPGTVLPQGFYVEGSGRSAPASRSGSRSQSRGPNNRARSSSNQRQPASTVKPDMAEEIAALVLAKLGKDAGQPKQVTKQSAKEVRQKILNKPRQKRTPNKQCPVQQCFGKRGPNQNFGGSEMLKLGTSDPQFPILAELAPTVGAFFFGSKLELVKKNSGGADEPTKDVYELQYSGAVRFDSTLPGFETIMKVLNENLNAYQKDGGADVVSPKPQRKGRRQAQEKKDEVDNVSVAKPKSSVQRNVSRELTPEDRSLLAQILDDGVVPDGLEDDSNV

SEQ ID NO: 6072 - protein, 1162 aa, Avian infectious bronchitis virus
MLVTPLLLVTLLCALCSAVLYDSSSYVYYYQSAFRPPSGWHLQGGAYAVVNISSEFNNAGSSSGCTVGIIHGGRVVNASSIAMTAPSSGMAWSSSQFCTAHCNFSDTTVFVTHCYKHGGCPLTGMLQQNLIRVSAMKNGQLFYNLTVSVAKYPTFRSFQCVNNLTSVYLNGDLVYTSNETIDVTSAGVYFKAGGPITYKVMREVKALAYFVNGTAQDVILCDGSPRGLLACQYNTGNFSDGFYPFTNSSLVKQKFIVYRENSVNTTCTLHNFIFHNETGANPNPSGVQNIQTYQTKTAQSGYYNFNFSFLSSFVYKESNFMYGSYHPSCKFRLETINNGLWFNSLSVSIAYGPLQGGCKQSVFKGRATCCYAYSYGGPSLCKGVYSGELDHNFECGLLVYVTKSGGSRIQTATEPPVITQNNYNNITLNTCVDYNIYGRTGQGFITNVTDSAVSYNYLADAGLAILDTSGSIDIFVVQGEYGLNYYKVNPCEDVNQQFVVSGGKLVGILTSRNETGSQLLENQFYIKITNGTRRFRRSITENVANCPYVSYGKFCIKPDGSIATIVPKQLEQFVAPLFNVTENVLIPNSFNLTVTDEYIQTRMDKVQINCLQYVCGSSLDCRKLFQQYGPVCDNILSVVNSVGQKEDMELLNFYSSTKPAGFNTPVLSNVSTGEFNISLLLTNPSSRRKRSLIEDLLFTSVESVGLPTNDAYKNCTAGPLGFFKDLACAREYNGLLVLPPIITAEMQALYTSSLVASMAFGGITAAGAIPFATQLQARINHLGITQSLLLKNQEKIAASFNKAIGHMQEGFRSTSLALQQIQDVVSKQSAILTETMASLNKNFGAISSVIQEIYQQFDAIQANAQVDRLITGRLSSLSVLASAKQAEYIRVSQQRELATQKINECVKSQSIRYSFCGNGRHVLTIPQNAPNGIVFIHFSYTPDSFVNVTAIVGFCVKPANASQYAIVPANGRGIFIQVNGSYYITARDMYMPRAITAGDVVTLTSCQANYVSVNKTVITTFVDNDDFDFNDELSKWWNDTKHELPDFDKFNYTVPILDIDSEIDRIQGVIQGLNDSLIDLEKLSILKTYIKWPWYVWLAIAFATIIFILILGWVFFMTGCCGCCCGCFGIMPLMSKCGKKSSYYTTFDNDVVTEQYRPKKSV

SEQ ID NO: 6073 - protein, 108 aa, Avian infectious bronchitis virus
MNLLNKSLEENGSFLTALYIIVGFLALYLLGRALQAFVQAADACCLFWYTWVVIPGAKGTAFVYKYTYGRKLNNPELEAVIVNEFPKNGWNNKNPANFQDAQRDKLYS

SEQ ID NO: 6074 - protein, 225 aa, Avian infectious bronchitis virus
MPNETNCTLDFEQSVQLFKEYNLFITAFLLFLTIILQYGYATRSKVIYTLKMIVLWCFWPLNIAVGVISCTYPPNTGGLVAAIILTVFACLSFVGYWIQSIRLFKRCRSWWSFNPESNAVGSILLTNGQQCNFAIESVPMVLSPIIKNGVLYCEGQWLAKCEPDHLPKDIFVCTPDRRNIYRMVQKYTGDQSGNKKRFATFVYAKQSVDTGELESVATGGSSLYT

SEQ ID NO: 6075 - protein, 409 aa, Avian infectious bronchitis virus
MASGKAAGKTDAPAPVIKLGGPKPPKVGSSGNASWFQAIKAKKLNTPPPKFEGSGVPDNENIKPSQQHGYWRRQARFKPGKGGRKPVPDAWYFYYTGTGPAADLNWGDTQDGIVWVAAKGADTKSRSNQGTRDPDKFDQYPLRFSDGGPDGNFRWDFIPLNRGRSGRSTAASSAAASRAPSREGSRGRRSDSGDDLIARAAKIIQDQQKKGSRITKAKADEMAHRRYCKRTIPPNYRVDQVFGPRTKGKEGNFGDDKMNEEGIKDGRVTAMLNLVPSSHACLFGSRVTPKLQLDGLHLRFEFTTVVPCDDPQFDNYVKICDQCVDGVGTRPKDDEPKPKSRSSSRPATRGNSPAPRQQRPKKEKKLKKQDDEADKALTSDEERNNAQLEFYDEPKVINWGDAALGENEL

SEQ ID NO: 6076 - DNA, 19 bp, Artificial Sequence
  Primer
ctacccaggaaaagccaac

SEQ ID NO: 6077 - DNA, 21 bp, Artificial Sequence
  Primer
gagtaactcgtccctcttctg

SEQ ID NO: 6078 - DNA, 19 bp, Artificial Sequence
  Primer
caactcagtttgcctgtcc

SEQ ID NO: 6079 - DNA, 22 bp, Artificial Sequence
  Primer
gcataccgcaatgttcttcttc

SEQ ID NO: 6080 - DNA, 22 bp, Artificial Sequence
  Primer
gaacaaaactggaacactaagc

SEQ ID NO: 6081 - DNA, 25 bp, Artificial Sequence
  Primer
cactctttccgaacaacttgattac

SEQ ID NO: 6082 - DNA, 20 bp, Artificial Sequence
  Primer
tgataagagctacgagcacc

SEQ ID NO: 6083 - DNA, 19 bp, Artificial Sequence
  Primer
tgtaccctgttgcatctcc

SEQ ID NO: 6084 - DNA, 22 bp, Artificial Sequence
  Primer
tcaaacattgaaactcgactcc

SEQ ID NO: 6085 - DNA, 23 bp, Artificial Sequence
  Primer
ctttctctgcttctacaagtgcc

SEQ ID NO: 6086 - DNA, 25 bp, Artificial Sequence
  Primer
gtctttcaaaaccattgttgagtcc

SEQ ID NO: 6087 - DNA, 19 bp, Artificial Sequence
  Primer
tacttcagacctgctcacc

SEQ ID NO: 6088 - DNA, 20 bp, Artificial Sequence
  Primer
cgtcaagggtcaaatacagg

SEQ ID NO: 6089 - DNA, 19 bp, Artificial Sequence
  Primer
ctgcaactactcatgcctc

SEQ ID NO: 6090 - DNA, 22 bp, Artificial Sequence
  Primer
ttgggaagttcaaggttacaag

SEQ ID NO: 6091 - DNA, 22 bp, Artificial Sequence
  Primer
ctctgtctacactgttgaatcc

SEQ ID NO: 6092 - DNA, 25 bp, Artificial Sequence
  Primer
cgtatgtattgttccttttaccctc

SEQ ID NO: 6093 - DNA, 21 bp, Artificial Sequence
  Primer
agaacctacacctgaagaacc

SEQ ID NO: 6094 - DNA, 24 bp, Artificial Sequence
  Primer
cattaagctaaatggccctcttac

SEQ ID NO: 6095 - DNA, 22 bp, Artificial Sequence
  Primer
tcacaggacatcttacttgcac

SEQ ID NO: 6096 - DNA, 21 bp, Artificial Sequence
  Primer
ctttccttgagaaggatgcac

SEQ ID NO: 6097 - DNA, 25 bp, Artificial Sequence
  Primer
gttgatgagtatataaccacgtacc

SEQ ID NO: 6098 - DNA, 22 bp, Artificial Sequence
  Primer
gccataatggcaaccatccaac

SEQ ID NO: 6099 - DNA, 21 bp, Artificial Sequence
  Primer
gctgaactctctaaatgagcc

SEQ ID NO: 6100 - DNA, 20 bp, Artificial Sequence
  Primer
caaagacatctgaggagcac

SEQ ID NO: 6101 - DNA, 21 bp, Artificial Sequence
  Primer
ggacaacactaatctccacac

SEQ ID NO: 6102 - DNA, 22 bp, Artificial Sequence
  Primer
gaagtcaaattcaatgcaccag

SEQ ID NO: 6103 - DNA, 24 bp, Artificial Sequence
  Primer
gagaaactatgacccatcttctac

SEQ ID NO: 6104 - DNA, 20 bp, Artificial Sequence
  Primer
gttatgatgtctgcaccacc

SEQ ID NO: 6105 - DNA, 21 bp, Artificial Sequence
  Primer
gctatctgtcacattcttccc

SEQ ID NO: 6106 - DNA, 21 bp, Artificial Sequence
  Primer
gaagacacacaaggaatggac

SEQ ID NO: 6107 - DNA, 24 bp, Artificial Sequence
  Primer
ggatttctgtgaaggttcttttcc

SEQ ID NO: 6108 - DNA, 20 bp, Artificial Sequence
  Primer
tcatcagcaattcttggctc

SEQ ID NO: 6109 - DNA, 20 bp, Artificial Sequence
  Primer
gctataagcgcaatcgtgcc

SEQ ID NO: 6110 - DNA, 21 bp, Artificial Sequence
  Primer
agaccaatcaaccctactgac

SEQ ID NO: 6111 - DNA, 19 bp, Artificial Sequence
  Primer
tccgctctcccattttgtc

SEQ ID NO: 6112 - DNA, 23 bp, Artificial Sequence
  Primer
gtctgcttctgtgtactacagtc

SEQ ID NO: 6113 - DNA, 19 bp, Artificial Sequence
  Primer
gcacttgttgctacagctc

SEQ ID NO: 6114 - DNA, 24 bp, Artificial Sequence
  Primer
ctcaaactttcacatcactctgac

SEQ ID NO: 6115 - DNA, 19 bp, Artificial Sequence
  Primer
gaaaacatgacgcccagag

SEQ ID NO: 6116 - DNA, 23 bp, Artificial Sequence
  Primer
gccagtacatacattgtcaatcc

SEQ ID NO: 6117 - DNA, 20 bp, Artificial Sequence
  Primer
gctacacaccttccaaactc

SEQ ID NO: 6118 - DNA, 24 bp, Artificial Sequence
  Primer
gatgcgatgaatctcatagctaac

SEQ ID NO: 6119 - DNA, 21 bp, Artificial Sequence
  Primer
gtatttctctgaagcactgcc

SEQ ID NO: 6120 - DNA, 19 bp, Artificial Sequence
  Primer
gaagggtgcatggtacaag

SEQ ID NO: 6121 - DNA, 21 bp, Artificial Sequence
  Primer
gtcatttgcacagcagaagac

SEQ ID NO: 6122 - DNA, 24 bp, Artificial Sequence
  Primer
tgatacttctaaccctaagacacc

SEQ ID NO: 6123 - DNA, 23 bp, Artificial Sequence
  Primer
gcaggtacagacacaaccataac

SEQ ID NO: 6124 - DNA, 20 bp, Artificial Sequence
  Primer
ctgctttgaaagagctgctg

SEQ ID NO: 6125 - DNA, 21 bp, Artificial Sequence
  Primer
gttaagcataagcacgcattc

SEQ ID NO: 6126 - DNA, 23 bp, Artificial Sequence
  Primer
gacagctcgcactgtttatgatg

SEQ ID NO: 6127 - DNA, 20 bp, Artificial Sequence
  Primer
gctgctactttggccttttc

SEQ ID NO: 6128 - DNA, 22 bp, Artificial Sequence
  Primer
ttaagttgttgggtattggagg

SEQ ID NO: 6129 - DNA, 24 bp, Artificial Sequence
  Primer
cggttcttcaacaacttagagtag

SEQ ID NO: 6130 - DNA, 19 bp, Artificial Sequence
  Primer
tatgccgcttatgccactg

SEQ ID NO: 6131 - DNA, 19 bp, Artificial Sequence
  Primer
gaggacaagagggcaaaag

SEQ ID NO: 6132 - DNA, 19 bp, Artificial Sequence
  Primer
accattgactacagcagcc

SEQ ID NO: 6133 - DNA, 22 bp, Artificial Sequence
  Primer
gcattactatcagaccaccaag

SEQ ID NO: 6134 - DNA, 19 bp, Artificial Sequence
  Primer
tgctacagaagtacctgcc

SEQ ID NO: 6135 - DNA, 22 bp, Artificial Sequence
  Primer
gccacattgaccatccaaatcc

SEQ ID NO: 6136 - DNA, 22 bp, Artificial Sequence
  Primer
cctaccacttgtgctaatgacc

SEQ ID NO: 6137 - DNA, 21 bp, Artificial Sequence
  Primer
actcgtcacatacaattgctg

SEQ ID NO: 6138 - DNA, 19 bp, Artificial Sequence
  Primer
tgcccatcctcactttgac

SEQ ID NO: 6139 - DNA, 23 bp, Artificial Sequence
  Primer
gttaggagtcgtacataatcagg

SEQ ID NO: 6140 - DNA, 25 bp, Artificial Sequence
  Primer
gggtaaggctagactttattatgac

SEQ ID NO: 6141 - DNA, 26 bp, Artificial Sequence
  Primer
gcgtaatgtcatccctactataactc

SEQ ID NO: 6142 - DNA, 22 bp, Artificial Sequence
  Primer
tgtggtaattggaacaagcaag

SEQ ID NO: 6143 - DNA, 20 bp, Artificial Sequence
  Primer
atccaaaatgtgacagagcc

SEQ ID NO: 6144 - DNA, 24 bp, Artificial Sequence
  Primer
gcggctcactatatgttaaaccag

SEQ ID NO: 6145 - DNA, 22 bp, Artificial Sequence
  Primer
acagccaatgtaaatgcacttc

SEQ ID NO: 6146 - DNA, 20 bp, Artificial Sequence
  Primer
gtccgcaatctacaacacag

SEQ ID NO: 6147 - DNA, 20 bp, Artificial Sequence
  Primer
tacctgccttacccagatcc

SEQ ID NO: 6148 - DNA, 24 bp, Artificial Sequence
  Primer
gctaactaatgataacacctcacg

SEQ ID NO: 6149 - DNA, 22 bp, Artificial Sequence
  Primer
gaccatgtcatttcaacatcac

SEQ ID NO: 6150 - DNA, 20 bp, Artificial Sequence
  Primer
gcaagtcacataagcctccc

SEQ ID NO: 6151 - DNA, 19 bp, Artificial Sequence
  Primer
agcagaaacgctcaaagcc

SEQ ID NO: 6152 - DNA, 21 bp, Artificial Sequence
  Primer
gacatctcacactgtaatgcc

SEQ ID NO: 6153 - DNA, 20 bp, Artificial Sequence
  Primer
ctctacactccaaggaccac

SEQ ID NO: 6154 - DNA, 19 bp, Artificial Sequence
  Primer
tcctgctcaattaccagcc

SEQ ID NO: 6155 - DNA, 22 bp, Artificial Sequence
  Primer
cagtgtgcagacttatgaaaac

SEQ ID NO: 6156 - DNA, 21 bp, Artificial Sequence
  Primer
ttcatctgcaatcaacagacc

SEQ ID NO: 6157 - DNA, 19 bp, Artificial Sequence
  Primer
taggattgcctacgcagac

SEQ ID NO: 6158 - DNA, 20 bp, Artificial Sequence
  Primer
tcctacacaggcacctacac

SEQ ID NO: 6159 - DNA, 23 bp, Artificial Sequence
  Primer
acataccaggcataccaaaggac

SEQ ID NO: 6160 - DNA, 23 bp, Artificial Sequence
  Primer
cctctccagctaggattttctac

SEQ ID NO: 6161 - DNA, 22 bp, Artificial Sequence
  Primer
tcaccagagttaatgcaaaacc

SEQ ID NO: 6162 - DNA, 22 bp, Artificial Sequence
  Primer
tcaagattggacctgaaagaac

SEQ ID NO: 6163 - DNA, 19 bp, Artificial Sequence
  Primer
aaccatgaccaacattgcc

SEQ ID NO: 6164 - DNA, 22 bp, Artificial Sequence
  Primer
aaggctatcaagtgtgtgcctc

SEQ ID NO: 6165 - DNA, 25 bp, Artificial Sequence
  Primer
gctacacatcacgataaattcactg

SEQ ID NO: 6166 - DNA, 20 bp, Artificial Sequence
  Primer
tgagtctcatggcaaacaag

SEQ ID NO: 6167 - DNA, 21 bp, Artificial Sequence
  Primer
aaaggacactttgatggacac

SEQ ID NO: 6168 - DNA, 25 bp, Artificial Sequence
  Primer
tgggctaagcgtaacattaaaccag

SEQ ID NO: 6169 - DNA, 22 bp, Artificial Sequence
  Primer
tcgctgctaatactgtaatctg

SEQ ID NO: 6170 - DNA, 19 bp, Artificial Sequence
  Primer
ggtgtctgcacaatgactg

SEQ ID NO: 6171 - DNA, 17 bp, Artificial Sequence
  Primer
tgcaacacggacgaaac

SEQ ID NO: 6172 - DNA, 20 bp, Artificial Sequence
  Primer
gcactagcacgtctctaacc

SEQ ID NO: 6173 - DNA, 20 bp, Artificial Sequence
  Primer
agtgttataccgctacgacc

SEQ ID NO: 6174 - DNA, 19 bp, Artificial Sequence
  Primer
ctgccatgcttagtgttcc

SEQ ID NO: 6175 - DNA, 19 bp, Artificial Sequence
  Primer
acctctcttcgactcgatg

SEQ ID NO: 6176 - DNA, 20 bp, Artificial Sequence
  Primer
aggaaacacaaactttgggc

SEQ ID NO: 6177 - DNA, 19 bp, Artificial Sequence
  Primer
tatacgccccatgaaaccc

SEQ ID NO: 6178 - DNA, 20 bp, Artificial Sequence
  Primer
cacacagcctccaaaacatc

SEQ ID NO: 6179 - DNA, 21 bp, Artificial Sequence
  Primer
gtagaagcagagaaagatgcc

SEQ ID NO: 6180 - DNA, 24 bp, Artificial Sequence
  Primer
ctgatctctgttgtccaatgttcc

SEQ ID NO: 6181 - DNA, 25 bp, Artificial Sequence
  Primer
gacgtaatgactgttcagaaatacc

SEQ ID NO: 6182 - DNA, 20 bp, Artificial Sequence
  Primer
aagcaacctgtatttgaccc

SEQ ID NO: 6183 - DNA, 20 bp, Artificial Sequence
  Primer
ttgagcgatgaagacttcac

SEQ ID NO: 6184 - DNA, 22 bp, Artificial Sequence
  Primer
cttcccaaacagtatcttctcc

SEQ ID NO: 6185 - DNA, 19 bp, Artificial Sequence
  Primer
tcacaacagcctctgctac

SEQ ID NO: 6186 - DNA, 25 bp, Artificial Sequence
  Primer
catcaatttcttcttcctcacactc

SEQ ID NO: 6187 - DNA, 22 bp, Artificial Sequence
  Primer
tcctcttcttcttcctcaactc

SEQ ID NO: 6188 - DNA, 20 bp, Artificial Sequence
  Primer
agcaaacaagaccctcctac

SEQ ID NO: 6189 - DNA, 21 bp, Artificial Sequence
  Primer
ccaaatatgcctgctgacaac

SEQ ID NO: 6190 - DNA, 25 bp, Artificial Sequence
  Primer
ccttaatttttggcttcacatcgac

SEQ ID NO: 6191 - DNA, 24 bp, Artificial Sequence
  Primer
ggttatatactcatcaactggcac

SEQ ID NO: 6192 - DNA, 22 bp, Artificial Sequence
  Primer
gcaagcatttctctcaaattcc

SEQ ID NO: 6193 - DNA, 24 bp, Artificial Sequence
  Primer
gcgcagcctcttcaagattaaaac

SEQ ID NO: 6194 - DNA, 19 bp, Artificial Sequence
  Primer
aagagccagccaaagaaac

SEQ ID NO: 6195 - DNA, 21 bp, Artificial Sequence
  Primer
gtaacatcagcaccatccaag

SEQ ID NO: 6196 - DNA, 24 bp, Artificial Sequence
  Primer
cctaccaagaaaactctcatcaag

SEQ ID NO: 6197 - DNA, 21 bp, Artificial Sequence
  Primer
tgaccacaatgtttacacacc

SEQ ID NO: 6198 - DNA, 19 bp, Artificial Sequence
  Primer
tagcatcacgaccacacac

SEQ ID NO: 6199 - DNA, 25 bp, Artificial Sequence
  Primer
gttcaatctctgtgtaagtaactcc

SEQ ID NO: 6200 - DNA, 21 bp, Artificial Sequence
  Primer
gtccattccttgtgtgtcttc

SEQ ID NO: 6201 - DNA, 21 bp, Artificial Sequence
  Primer
ttccacataagcagccataag

SEQ ID NO: 6202 - DNA, 19 bp, Artificial Sequence
  Primer
atgccaaaacccactcagc

SEQ ID NO: 6203 - DNA, 19 bp, Artificial Sequence
  Primer
ggcctccatttgcatagac

SEQ ID NO: 6204 - DNA, 24 bp, Artificial Sequence
  Primer
gccatttttcacagcaacactatc

SEQ ID NO: 6205 - DNA, 24 bp, Artificial Sequence
  Primer
ggacttgccatcaaaaactatgac

SEQ ID NO: 6206 - DNA, 22 bp, Artificial Sequence
  Primer
cttcagtactatctccaacgtc

SEQ ID NO: 6207 - DNA, 25 bp, Artificial Sequence
  Primer
ggaacactaaaagttgctgaaaagg

SEQ ID NO: 6208 - DNA, 20 bp, Artificial Sequence
  Primer
caactgtcacctgtcacttc

SEQ ID NO: 6209 - DNA, 20 bp, Artificial Sequence
  Primer
tgactttttgctacttgggc

SEQ ID NO: 6210 - DNA, 20 bp, Artificial Sequence
  Primer
gttcttcttggcagcactac

SEQ ID NO: 6211 - DNA, 17 bp, Artificial Sequence
  Primer
agcagcaagaacgcaag

SEQ ID NO: 6212 - DNA, 19 bp, Artificial Sequence
  Primer
ttcatcgcatcaacaccac

SEQ ID NO: 6213 - DNA, 25 bp, Artificial Sequence
  Primer
ccaaaaaggcacaataggagaaaac

SEQ ID NO: 6214 - DNA, 22 bp, Artificial Sequence
  Primer
tgccattttcctaaaaccactc

SEQ ID NO: 6215 - DNA, 18 bp, Artificial Sequence
  Primer
aacattgccagcctgaac

SEQ ID NO: 6216 - DNA, 22 bp, Artificial Sequence
  Primer
tcaactttaagcctaagcagac

SEQ ID NO: 6217 - DNA, 20 bp, Artificial Sequence
  Primer
gataacagcagcatacagcc

SEQ ID NO: 6218 - DNA, 21 bp, Artificial Sequence
  Primer
gcagctctttcaaagcagcac

SEQ ID NO: 6219 - DNA, 19 bp, Artificial Sequence
  Primer
gcatccaatgatgagtgcc

SEQ ID NO: 6220 - DNA, 19 bp, Artificial Sequence
  Primer
aaacacgtctagcagcatc

SEQ ID NO: 6221 - DNA, 25 bp, Artificial Sequence
  Primer
gtcgtaacgacaccagaatagttag

SEQ ID NO: 6222 - DNA, 22 bp, Artificial Sequence
  Primer
tttacctccaatacccaacaac

SEQ ID NO: 6223 - DNA, 22 bp, Artificial Sequence
  Primer
cattgtggagttgtacacattg

SEQ ID NO: 6224 - DNA, 18 bp, Artificial Sequence
  Primer
agcatttcctcgcacaac

SEQ ID NO: 6225 - DNA, 20 bp, Artificial Sequence
  Primer
acttttgccctcttgtcctc

SEQ ID NO: 6226 - DNA, 19 bp, Artificial Sequence
  Primer
cagggacaacaaccatgag

SEQ ID NO: 6227 - DNA, 19 bp, Artificial Sequence
  Primer
atgccagcacaaacctacc

SEQ ID NO: 6228 - DNA, 19 bp, Artificial Sequence
  Primer
aagcacagaaggaaagcac

SEQ ID NO: 6229 - DNA, 24 bp, Artificial Sequence
  Primer
cttacctttcaagtcacagaatcc

SEQ ID NO: 6230 - DNA, 25 bp, Artificial Sequence
  Primer
tacagccataacctttccacattcc

SEQ ID NO: 6231 - DNA, 20 bp, Artificial Sequence
  Primer
tgccttcctcatccttctcc

SEQ ID NO: 6232 - DNA, 19 bp, Artificial Sequence
  Primer
cctacaatgcctgcatcac

SEQ ID NO: 6233 - DNA, 24 bp, Artificial Sequence
  Primer
gaaggatacacctatcatccaaac

SEQ ID NO: 6234 - DNA, 22 bp, Artificial Sequence
  Primer
tgttagtgcagctactgaaaag

SEQ ID NO: 6235 - DNA, 23 bp, Artificial Sequence
  Primer
ctacagatagagacaccagctac

SEQ ID NO: 6236 - DNA, 22 bp, Artificial Sequence
  Primer
ccaccgtaaaacttgcttgttc

SEQ ID NO: 6237 - DNA, 19 bp, Artificial Sequence
  Primer
gcgagcaagaacaagagag

SEQ ID NO: 6238 - DNA, 21 bp, Artificial Sequence
  Primer
tttaacatatagtgagccgcc

SEQ ID NO: 6239 - DNA, 23 bp, Artificial Sequence
  Primer
gttgtagattgcggacatacttg

SEQ ID NO: 6240 - DNA, 21 bp, Artificial Sequence
  Primer
acgcaggtaagcgtaaaactc

SEQ ID NO: 6241 - DNA, 22 bp, Artificial Sequence
  Primer
caatatcatcgacaaaacagcc

SEQ ID NO: 6242 - DNA, 22 bp, Artificial Sequence
  Primer
gaaagacatcagcatactcctg

SEQ ID NO: 6243 - DNA, 25 bp, Artificial Sequence
  Primer
gcaaacatagggattaacagacaac

SEQ ID NO: 6244 - DNA, 25 bp, Artificial Sequence
  Primer
cacataatggaaaactaatgggagg

SEQ ID NO: 6245 - DNA, 24 bp, Artificial Sequence
  Primer
gtatgtaatcgccagcattagtcc

SEQ ID NO: 6246 - DNA, 20 bp, Artificial Sequence
  Primer
acagcatcaccatagtcacc

SEQ ID NO: 6247 - DNA, 23 bp, Artificial Sequence
  Primer
gcaaaatgactcttaccagtacc

SEQ ID NO: 6248 - DNA, 20 bp, Artificial Sequence
  Primer
gcaggatcgccaatatagac

SEQ ID NO: 6249 - DNA, 22 bp, Artificial Sequence
  Primer
cactcacagtgtcaacaatttc

SEQ ID NO: 6250 - DNA, 22 bp, Artificial Sequence
  Primer
cattttgaagcattgagctgac

SEQ ID NO: 6251 - DNA, 22 bp, Artificial Sequence
  Primer
cagaaccctgtgatgaatcaac

SEQ ID NO: 6252 - DNA, 22 bp, Artificial Sequence
  Primer
cagacattatgcacaaaatgcc

SEQ ID NO: 6253 - DNA, 24 bp, Artificial Sequence
  Primer
gggtaaccattgacttggtaattc

SEQ ID NO: 6254 - DNA, 21 bp, Artificial Sequence
  Primer
catcaaagccaatccacgcac

SEQ ID NO: 6255 - DNA, 20 bp, Artificial Sequence
  Primer
tccagggcaagcctttatac

SEQ ID NO: 6256 - DNA, 20 bp, Artificial Sequence
  Primer
ccacagaatgattccagcag

SEQ ID NO: 6257 - DNA, 19 bp, Artificial Sequence
  Primer
taaagccccactgctgaac

SEQ ID NO: 6258 - DNA, 22 bp, Artificial Sequence
  Primer
gaacttccattctacttcagcc

SEQ ID NO: 6259 - DNA, 25 bp, Artificial Sequence
  Primer
ccaaaacaaacaaacaccatcagtg

SEQ ID NO: 6260 - DNA, 23 bp, Artificial Sequence
  Primer
cacatacaaactaccaccatcac

SEQ ID NO: 6261 - DNA, 23 bp, Artificial Sequence
  Primer
ggctaaatccagcagaaatcatc

SEQ ID NO: 6262 - DNA, 19 bp, Artificial Sequence
  Primer
tacgcttagcccaaagctc

SEQ ID NO: 6263 - DNA, 24 bp, Artificial Sequence
  Primer
aatgtcagtcattgtgcagacacc

SEQ ID NO: 6264 - DNA, 21 bp, Artificial Sequence
  Primer
ccttccactctaccatcaaac

SEQ ID NO: 6265 - DNA, 21 bp, Artificial Sequence
  Primer
gacctttgactgaaccttctg

SEQ ID NO: 6266 - DNA, 23 bp, Artificial Sequence
  Primer
cctactttactcagagcagagac

SEQ ID NO: 6267 - DNA, 25 bp, Artificial Sequence
  Primer
gtcagtgatttcaaaagtggtcaag

SEQ ID NO: 6268 - DNA, 22 bp, Artificial Sequence
  Primer
tctacccaaaactacaagcaag

SEQ ID NO: 6269 - DNA, 19 bp, Artificial Sequence
  Primer
ttgccaactggcacactac

SEQ ID NO: 6270 - DNA, 21 bp, Artificial Sequence
  Primer
tcttggaatgctgacctttac

SEQ ID NO: 6271 - DNA, 22 bp, Artificial Sequence
  Primer
gccattcttacagccttttcac

SEQ ID NO: 6272 - DNA, 23 bp, Artificial Sequence
  Primer
ccacttgctgaactcaaatgctc

SEQ ID NO: 6273 - DNA, 21 bp, Artificial Sequence
  Primer
ctctgtgctctacaactcaac

SEQ ID NO: 6274 - DNA, 25 bp, Artificial Sequence
  Primer
gccagatgatttcatgggttgtgtc

SEQ ID NO: 6275 - DNA, 20 bp, Artificial Sequence
  Primer
tctaatgtgcctttctcccc

SEQ ID NO: 6276 - DNA, 20 bp, Artificial Sequence
  Primer
actgattccgttcgagatcc

SEQ ID NO: 6277 - DNA, 20 bp, Artificial Sequence
  Primer
catgcagatcaactcacacc

SEQ ID NO: 6278 - DNA, 21 bp, Artificial Sequence
  Primer
ggctaaaacctccgtagattg

SEQ ID NO: 6279 - DNA, 20 bp, Artificial Sequence
  Primer
ttacctgaccctctaaagcc

SEQ ID NO: 6280 - DNA, 22 bp, Artificial Sequence
  Primer
attgctgcctacactgctgctc

SEQ ID NO: 6281 - DNA, 20 bp, Artificial Sequence
  Primer
cggaggtacaaattgacagg

SEQ ID NO: 6282 - DNA, 21 bp, Artificial Sequence
  Primer
gctaccaccttatgtccttcc

SEQ ID NO: 6283 - DNA, 20 bp, Artificial Sequence
  Primer
gcgacatttcaggcattaac

SEQ ID NO: 6284 - DNA, 20 bp, Artificial Sequence
  Primer
actctgagccagttctcaag

SEQ ID NO: 6285 - DNA, 19 bp, Artificial Sequence
  Primer
acaagcctcactccctttc

SEQ ID NO: 6286 - DNA, 26 bp, Artificial Sequence
  Primer
ccaagaacccattactttatgatgcc

SEQ ID NO: 6287 - DNA, 22 bp, Artificial Sequence
  Primer
ctgaaggtgacggcatttcaac

SEQ ID NO: 6288 - DNA, 20 bp, Artificial Sequence
  Primer
tatgatgagccgacgacgac

SEQ ID NO: 6289 - DNA, 22 bp, Artificial Sequence
  Primer
tagtcacactagccatccttac

SEQ ID NO: 6290 - DNA, 21 bp, Artificial Sequence
  Primer
caactcctggaacaatggaac

SEQ ID NO: 6291 - DNA, 19 bp, Artificial Sequence
  Primer
ttttgtgcttgctgctgtc

SEQ ID NO: 6292 - DNA, 20 bp, Artificial Sequence
  Primer
tcttctcaatgtgcctctcc

SEQ ID NO: 6293 - DNA, 20 bp, Artificial Sequence
  Primer
gacctgccaaaagagatcac

SEQ ID NO: 6294 - DNA, 22 bp, Artificial Sequence
  Primer
tgcgagctatatcactatcagg

SEQ ID NO: 6295 - DNA, 20 bp, Artificial Sequence
  Primer
gcccatcaggaacatacgag

SEQ ID NO: 6296 - DNA, 23 bp, Artificial Sequence
  Primer
cgaaatccaggatctagaagaac

SEQ ID NO: 6297 - DNA, 19 bp, Artificial Sequence
  Primer
gaaggtcaccaaactgctg

SEQ ID NO: 6298 - DNA, 24 bp, Artificial Sequence
  Primer
ccacagattcaactgacaataacc

SEQ ID NO: 6299 - DNA, 20 bp, Artificial Sequence
  Primer
tggtgacggcaaaatgaaag

SEQ ID NO: 6300 - DNA, 19 bp, Artificial Sequence
  Primer
tcttctcgctcctcatcac

SEQ ID NO: 6301 - DNA, 19 bp, Artificial Sequence
  Primer
gcatctaaaaagcctcgcc

SEQ ID NO: 6302 - DNA, 22 bp, Artificial Sequence
  Primer
catacaaaacattcccaccaac

SEQ ID NO: 6303 - DNA, 18 bp, Artificial Sequence
  Primer
acaaaagaagcagcccac

SEQ ID NO: 6304 - DNA, 22 bp, Artificial Sequence
  Primer
cattagggaggacttgaaagag

SEQ ID NO: 6305 - DNA, 22 bp, Artificial Sequence
  Primer
agatcaatcacagaacacacac

SEQ ID NO: 6306 - DNA, 22 bp, Artificial Sequence
  Primer
tacaagttaggcatcgcaacac

SEQ ID NO: 6307 - DNA, 21 bp, Artificial Sequence
  Primer
gtcggagacgaagtcattaag

SEQ ID NO: 6308 - DNA, 23 bp, Artificial Sequence
  Primer
ccacacagataagtgaaaaaccc

SEQ ID NO: 6309 - DNA, 24 bp, Artificial Sequence
  Primer
gaagacaactggataggatttgtg

SEQ ID NO: 6310 - DNA, 20 bp, Artificial Sequence
  Primer
acatctcctgagggaacaac

SEQ ID NO: 6311 - DNA, 23 bp, Artificial Sequence
  Primer
ctctcccatgcatagacagaagg

SEQ ID NO: 6312 - DNA, 21 bp, Artificial Sequence
  Primer
cagcaataacaccagtttgtc

SEQ ID NO: 6313 - DNA, 22 bp, Artificial Sequence
  Primer
ggtttgccatcaggggagaaag

SEQ ID NO: 6314 - DNA, 20 bp, Artificial Sequence
  Primer
acaccagtaccagtgagtcc

SEQ ID NO: 6315 - DNA, 20 bp, Artificial Sequence
  Primer
tcagctcctataagacagcc

SEQ ID NO: 6316 - DNA, 24 bp, Artificial Sequence
  Primer
gcacctaaagacatagtataagcc

SEQ ID NO: 6317 - DNA, 19 bp, Artificial Sequence
  Primer
acttgagcgaacacttcac

SEQ ID NO: 6318 - DNA, 20 bp, Artificial Sequence
  Primer
aagtccattgaacttctgcg

SEQ ID NO: 6319 - DNA, 22 bp, Artificial Sequence
  Primer
cctgtcaatttgtacctccgcc

SEQ ID NO: 6320 - DNA, 19 bp, Artificial Sequence
  Primer
tgggaaggacataaggtgg

SEQ ID NO: 6321 - DNA, 18 bp, Artificial Sequence
  Primer
aatgcctgaaatgtcgcc

SEQ ID NO: 6322 - DNA, 19 bp, Artificial Sequence
  Primer
gcagcaagaaccacaagag

SEQ ID NO: 6323 - DNA, 19 bp, Artificial Sequence
  Primer
cgccaataacaagccatcc

SEQ ID NO: 6324 - DNA, 20 bp, Artificial Sequence
  Primer
tccaacaaagccaacatctc

SEQ ID NO: 6325 - DNA, 26 bp, Artificial Sequence
  Primer
cctgagtgcctatcctcagaataacc

SEQ ID NO: 6326 - DNA, 22 bp, Artificial Sequence
  Primer
gcacattcggtgggtctttaac

SEQ ID NO: 6327 - DNA, 24 bp, Artificial Sequence
  Primer
tgactagcaagaataccacgaaag

SEQ ID NO: 6328 - DNA, 24 bp, Artificial Sequence
  Primer
tttagaccagaagatcaggaactc

SEQ ID NO: 6329 - DNA, 20 bp, Artificial Sequence
  Primer
ctaagccacatcaagcctac

SEQ ID NO: 6330 - DNA, 25 bp, Artificial Sequence
  Primer
gagaagaatgtttgtttctgggttg

SEQ ID NO: 6331 - DNA, 20 bp, Artificial Sequence
  Primer
gcaaaacctgaatcagtgcc

SEQ ID NO: 6332 - DNA, 23 bp, Artificial Sequence
  Primer
ccaaatagcaatcctgaaagtcc

SEQ ID NO: 6333 - DNA, 20 bp, Artificial Sequence
  Primer
acaagcaaaagcaaagtgtg

SEQ ID NO: 6334 - DNA, 22 bp, Artificial Sequence
  Primer
gagcagcaacaatgagaaaaag

SEQ ID NO: 6335 - DNA, 17 bp, Artificial Sequence
  Primer
agcacaaagccaagcag

SEQ ID NO: 6336 - DNA, 19 bp, Artificial Sequence
  Primer
cattgcgtcctccattctg

SEQ ID NO: 6337 - DNA, 19 bp, Artificial Sequence
  Primer
tcattttgccgtcaccacc

SEQ ID NO: 6338 - DNA, 19 bp, Artificial Sequence
  Primer
tgatgaggagcgagaagag

SEQ ID NO: 6339 - DNA, 22 bp, Artificial Sequence
  Primer
gcctttaccagaaactttgctc

SEQ ID NO: 6340 - DNA, 19 bp, Artificial Sequence
  Primer
tgcgtcaatgtgcttgttc

SEQ ID NO: 6341 - DNA, 19 bp, Artificial Sequence
  Primer
gaatcagcagaagctccac

SEQ ID NO: 6342 - DNA, 21 bp, Artificial Sequence
  Primer
gctctccctagcattattcac

SEQ ID NO: 6343 - DNA, 21 bp, Artificial Sequence
  Primer
aaaatcacatggggatagcac

SEQ ID NO: 6344 - DNA, 19 bp, Artificial Sequence
  Primer
ctgagagtgcttgttcttc

SEQ ID NO: 6345 - DNA, 20 bp, Artificial Sequence
  Primer
atcgtttatggagatttcag

SEQ ID NO: 6346 - DNA, 20 bp, Artificial Sequence
  Primer
gagcgtggcaaccaggtgtt

SEQ ID NO: 6347 - DNA, 20 bp, Artificial Sequence
  Primer
ttattattagcgatatgtat

SEQ ID NO: 6348 - DNA, 20 bp, Artificial Sequence
  Primer
ggaactgctgtaatgtctct

SEQ ID NO: 6349 - DNA, 20 bp, Artificial Sequence
  Primer
aaccctgtcataccttttaa

SEQ ID NO: 6350 - DNA, 20 bp, Artificial Sequence
  Primer
aataaagatgggtttctcta

SEQ ID NO: 6351 - DNA, 20 bp, Artificial Sequence
  Primer
gatgttgtgagattccctaa

SEQ ID NO: 6352 - DNA, 20 bp, Artificial Sequence
  Primer
ttgatgctacttcaactggt

SEQ ID NO: 6353 - DNA, 20 bp, Artificial Sequence
  Primer
gccgtgatgtttctgatttc

SEQ ID NO: 6354 - DNA, 20 bp, Artificial Sequence
  Primer
tggcttatactatgtcttta

SEQ ID NO: 6355 - DNA, 20 bp, Artificial Sequence
  Primer
cctgaccctctaaagccaac

SEQ ID NO: 6356 - DNA, 20 bp, Artificial Sequence
  Primer
gcgattagtcaaattcaaga

SEQ ID NO: 6357 - DNA, 20 bp, Artificial Sequence
  Primer
ctaccaccttatgtccttcc

SEQ ID NO: 6358 - DNA, 20 bp, Artificial Sequence
  Primer
cgcttctgtcgtcaacattc

SEQ ID NO: 6359 - DNA, 20 bp, Artificial Sequence
  Primer
attgacaatgcttctcctgc

SEQ ID NO: 6360 - DNA, 20 bp, Artificial Sequence
  Primer
tgatgccaactactttgttt

SEQ ID NO: 6361 - DNA, 20 bp, Artificial Sequence
  Primer
tgagccgacgacgactacta

SEQ ID NO: 6362 - DNA, 20 bp, Artificial Sequence
  Primer
gagcttaaacaactcctgga

SEQ ID NO: 6363 - DNA, 20 bp, Artificial Sequence
  Primer
tgtgaccagaccgctcatgg

SEQ ID NO: 6364 - DNA, 20 bp, Artificial Sequence
  Primer
ctatttggaatcttgacgtt

SEQ ID NO: 6365 - DNA, 20 bp, Artificial Sequence
  Primer
tgcaagatcagtttcaccaa

SEQ ID NO: 6366 - DNA, 20 bp, Artificial Sequence
  Primer
cctcatgtgcttgaagatcc

SEQ ID NO: 6367 - DNA, 20 bp, Artificial Sequence
  Primer
caacacctagctataagcgc

SEQ ID NO: 6368 - DNA, 20 bp, Artificial Sequence
  Primer
attaaaacaaggaatagcag

SEQ ID NO: 6369 - DNA, 20 bp, Artificial Sequence
  Primer
ctgatagtgatatagctcgc

SEQ ID NO: 6370 - DNA, 20 bp, Artificial Sequence
  Primer
aatcagtgcctacacgctgc

SEQ ID NO: 6371 - DNA, 20 bp, Artificial Sequence
  Primer
ctgtagacagcagcaagcac

SEQ ID NO: 6372 - DNA, 20 bp, Artificial Sequence
  Primer
gcgcagtaaggatggctagt

SEQ ID NO: 6373 - DNA, 20 bp, Artificial Sequence
  Primer
acaacgacatagtctttaac

SEQ ID NO: 6374 - DNA, 20 bp, Artificial Sequence
  Primer
gcaaatgaactggaagccct

SEQ ID NO: 6375 - DNA, 20 bp, Artificial Sequence
  Primer
gcaacaactagtcatgcaac

SEQ ID NO: 6376 - DNA, 20 bp, Artificial Sequence
  Primer
taacgacatcacaatttcct

SEQ ID NO: 6377 - DNA, 20 bp, Artificial Sequence
  Primer
aggtttgaaggctttgaagt

SEQ ID NO: 6378 - DNA, 20 bp, Artificial Sequence
  Primer
agcagcagtgtaggcagcaa

SEQ ID NO: 6379 - DNA, 20 bp, Artificial Sequence
  Primer
ccatattggagaagcaaatt

SEQ ID NO: 6380 - DNA, 20 bp, Artificial Sequence
  Primer
tgatctgcatgaattgctgt

SEQ ID NO: 6381 - DNA, 20 bp, Artificial Sequence
  Primer
agccaatgccagtagtggtg

SEQ ID NO: 6382 - DNA, 20 bp, Artificial Sequence
  Primer
agaaacgccatagcacttaa

SEQ ID NO: 6383 - DNA, 20 bp, Artificial Sequence
  Primer
tgccccaaatgtcttgagca

SEQ ID NO: 6384 - DNA, 20 bp, Artificial Sequence
  Primer
ataacaacattagtagaatt

SEQ ID NO: 6385 - DNA, 20 bp, Artificial Sequence
  Primer
cacttgaaaccacaactctg

SEQ ID NO: 6386 - DNA, 20 bp, Artificial Sequence
  Primer
ctctgttatctttacagcta

SEQ ID NO: 6387 - DNA, 20 bp, Artificial Sequence
  Primer
aagtattgacacagttgagt

SEQ ID NO: 6388 - DNA, 20 bp, Artificial Sequence
  Primer
ttttcactgtgctgtccata

SEQ ID NO: 6389 - DNA, 20 bp, Artificial Sequence
  Primer
tagacctttgactgaacctt

SEQ ID NO: 6390 - DNA, 20 bp, Artificial Sequence
  Primer
ttaatgatggaaacaggtgc

SEQ ID NO: 6391 - DNA, 20 bp, Artificial Sequence
  Primer
gaaagctggagtgtggaatg

SEQ ID NO: 6392 - DNA, 20 bp, Artificial Sequence
  Primer
ttaaccctcagttcatctcc

SEQ ID NO: 6393 - DNA, 19 bp, Artificial Sequence
  Primer
ctacccaggaaaagccaac

SEQ ID NO: 6394 - DNA, 19 bp, Artificial Sequence
  Primer
caactcagtttgcctgtcc

SEQ ID NO: 6395 - DNA, 22 bp, Artificial Sequence
  Primer
gaacaaaactggaacactaagc

SEQ ID NO: 6396 - DNA, 20 bp, Artificial Sequence
  Primer
tgataagagctacgagcacc

SEQ ID NO: 6397 - DNA, 22 bp, Artificial Sequence
  Primer
tcaaacattgaaactcgactcc

SEQ ID NO: 6398 - DNA, 25 bp, Artificial Sequence
  Primer
gtctttcaaaaccattgttgagtcc

SEQ ID NO: 6399 - DNA, 20 bp, Artificial Sequence
  Primer
cgtcaagggtcaaatacagg

SEQ ID NO: 6400 - DNA, 22 bp, Artificial Sequence
  Primer
ttgggaagttcaaggttacaag

SEQ ID NO: 6401 - DNA, 25 bp, Artificial Sequence
  Primer
cgtatgtattgttccttttaccctc

SEQ ID NO: 6402 - DNA, 24 bp, Artificial Sequence
  Primer
cattaagctaaatggccctcttac

SEQ ID NO: 6403 - DNA, 21 bp, Artificial Sequence
  Primer
ctttccttgagaaggatgcac

SEQ ID NO: 6404 - DNA, 22 bp, Artificial Sequence
  Primer
gccataatggcaaccatccaac

SEQ ID NO: 6405 - DNA, 20 bp, Artificial Sequence
  Primer
caaagacatctgaggagcac

SEQ ID NO: 6406 - DNA, 22 bp, Artificial Sequence
  Primer
gaagtcaaattcaatgcaccag

SEQ ID NO: 6407 - DNA, 20 bp, Artificial Sequence
  Primer
gttatgatgtctgcaccacc

SEQ ID NO: 6408 - DNA, 21 bp, Artificial Sequence
  Primer
gaagacacacaaggaatggac

SEQ ID NO: 6409 - DNA, 20 bp, Artificial Sequence
  Primer
tcatcagcaattcttggctc

SEQ ID NO: 6410 - DNA, 21 bp, Artificial Sequence
  Primer
agaccaatcaaccctactgac

SEQ ID NO: 6411 - DNA, 23 bp, Artificial Sequence
  Primer
gtctgcttctgtgtactacagtc

SEQ ID NO: 6412 - DNA, 24 bp, Artificial Sequence
  Primer
ctcaaactttcacatcactctgac

SEQ ID NO: 6413 - DNA, 23 bp, Artificial Sequence
  Primer
gccagtacatacattgtcaatcc

SEQ ID NO: 6414 - DNA, 24 bp, Artificial Sequence
  Primer
gatgcgatgaatctcatagctaac

SEQ ID NO: 6415 - DNA, 19 bp, Artificial Sequence
  Primer
gaagggtgcatggtacaag

SEQ ID NO: 6416 - DNA, 24 bp, Artificial Sequence
  Primer
tgatacttctaaccctaagacacc

SEQ ID NO: 6417 - DNA, 20 bp, Artificial Sequence
  Primer
ctgctttgaaagagctgctg

SEQ ID NO: 6418 - DNA, 23 bp, Artificial Sequence
  Primer
gacagctcgcactgtttatgatg

SEQ ID NO: 6419 - DNA, 22 bp, Artificial Sequence
  Primer
ttaagttgttgggtattggagg

SEQ ID NO: 6420 - DNA, 19 bp, Artificial Sequence
  Primer
tatgccgcttatgccactg

SEQ ID NO: 6421 - DNA, 19 bp, Artificial Sequence
  Primer
accattgactacagcagcc

SEQ ID NO: 6422 - DNA, 19 bp, Artificial Sequence
  Primer
tgctacagaagtacctgcc

SEQ ID NO: 6423 - DNA, 22 bp, Artificial Sequence
  Primer
cctaccacttgtgctaatgacc

SEQ ID NO: 6424 - DNA, 19 bp, Artificial Sequence
  Primer
tgcccatcctcactttgac

SEQ ID NO: 6425 - DNA, 25 bp, Artificial Sequence
  Primer
gggtaaggctagactttattatgac

SEQ ID NO: 6426 - DNA, 22 bp, Artificial Sequence
  Primer
tgtggtaattggaacaagcaag

SEQ ID NO: 6427 - DNA, 24 bp, Artificial Sequence
  Primer
gcggctcactatatgttaaaccag

SEQ ID NO: 6428 - DNA, 20 bp, Artificial Sequence
  Primer
gtccgcaatctacaacacag

SEQ ID NO: 6429 - DNA, 24 bp, Artificial Sequence
  Primer
gctaactaatgataacacctcacg

SEQ ID NO: 6430 - DNA, 20 bp, Artificial Sequence
  Primer
gcaagtcacataagcctccc

SEQ ID NO: 6431 - DNA, 21 bp, Artificial Sequence
  Primer
gacatctcacactgtaatgcc

SEQ ID NO: 6432 - DNA, 19 bp, Artificial Sequence
  Primer
tcctgctcaattaccagcc

SEQ ID NO: 6433 - DNA, 21 bp, Artificial Sequence
  Primer
ttcatctgcaatcaacagacc

SEQ ID NO: 6434 - DNA, 20 bp, Artificial Sequence
  Primer
tcctacacaggcacctacac

SEQ ID NO: 6435 - DNA, 23 bp, Artificial Sequence
  Primer
cctctccagctaggattttctac

SEQ ID NO: 6436 - DNA, 22 bp, Artificial Sequence
  Primer
tcaagattggacctgaaagaac

SEQ ID NO: 6437 - DNA, 22 bp, Artificial Sequence
  Primer
aaggctatcaagtgtgtgcctc

SEQ ID NO: 6438 - DNA, 20 bp, Artificial Sequence
  Primer
tgagtctcatggcaaacaag

SEQ ID NO: 6439 - DNA, 25 bp, Artificial Sequence
  Primer
tgggctaagcgtaacattaaaccag

SEQ ID NO: 6440 - DNA, 19 bp, Artificial Sequence
  Primer
ggtgtctgcacaatgactg

SEQ ID NO: 6441 - DNA, 20 bp, Artificial Sequence
  Primer
gcactagcacgtctctaacc

SEQ ID NO: 6442 - DNA, 19 bp, Artificial Sequence
  Primer
ctgccatgcttagtgttcc

SEQ ID NO: 6443 - DNA, 20 bp, Artificial Sequence
  Primer
aggaaacacaaactttgggc

SEQ ID NO: 6444 - DNA, 20 bp, Artificial Sequence
  Primer
cacacagcctccaaaacatc

SEQ ID NO: 6445 - DNA, 24 bp, Artificial Sequence
  Primer
ctgatctctgttgtccaatgttcc

SEQ ID NO: 6446 - DNA, 20 bp, Artificial Sequence
  Primer
aagcaacctgtatttgaccc

SEQ ID NO: 6447 - DNA, 22 bp, Artificial Sequence
  Primer
cttcccaaacagtatcttctcc

SEQ ID NO: 6448 - DNA, 25 bp, Artificial Sequence
  Primer
catcaatttcttcttcctcacactc

SEQ ID NO: 6449 - DNA, 20 bp, Artificial Sequence
  Primer
agcaaacaagaccctcctac

SEQ ID NO: 6450 - DNA, 25 bp, Artificial Sequence
  Primer
ccttaatttttggcttcacatcgac

SEQ ID NO: 6451 - DNA, 22 bp, Artificial Sequence
  Primer
gcaagcatttctctcaaattcc

SEQ ID NO: 6452 - DNA, 19 bp, Artificial Sequence
  Primer
aagagccagccaaagaaac

SEQ ID NO: 6453 - DNA, 24 bp, Artificial Sequence
  Primer
cctaccaagaaaactctcatcaag

SEQ ID NO: 6454 - DNA, 19 bp, Artificial Sequence
  Primer
tagcatcacgaccacacac

SEQ ID NO: 6455 - DNA, 21 bp, Artificial Sequence
  Primer
gtccattccttgtgtgtcttc

SEQ ID NO: 6456 - DNA, 19 bp, Artificial Sequence
  Primer
atgccaaaacccactcagc

SEQ ID NO: 6457 - DNA, 24 bp, Artificial Sequence
  Primer
gccatttttcacagcaacactatc

SEQ ID NO: 6458 - DNA, 22 bp, Artificial Sequence
  Primer
cttcagtactatctccaacgtc

SEQ ID NO: 6459 - DNA, 20 bp, Artificial Sequence
  Primer
caactgtcacctgtcacttc

SEQ ID NO: 6460 - DNA, 20 bp, Artificial Sequence
  Primer
gttcttcttggcagcactac

SEQ ID NO: 6461 - DNA, 19 bp, Artificial Sequence
  Primer
ttcatcgcatcaacaccac

SEQ ID NO: 6462 - DNA, 22 bp, Artificial Sequence
  Primer
tgccattttcctaaaaccactc

SEQ ID NO: 6463 - DNA, 22 bp, Artificial Sequence
  Primer
tcaactttaagcctaagcagac

SEQ ID NO: 6464 - DNA, 21 bp, Artificial Sequence
  Primer
gcagctctttcaaagcagcac

SEQ ID NO: 6465 - DNA, 19 bp, Artificial Sequence
  Primer
aaacacgtctagcagcatc

SEQ ID NO: 6466 - DNA, 22 bp, Artificial Sequence
  Primer
tttacctccaatacccaacaac

SEQ ID NO: 6467 - DNA, 18 bp, Artificial Sequence
  Primer
agcatttcctcgcacaac

SEQ ID NO: 6468 - DNA, 19 bp, Artificial Sequence
  Primer
cagggacaacaaccatgag

SEQ ID NO: 6469 - DNA, 19 bp, Artificial Sequence
  Primer
aagcacagaaggaaagcac

SEQ ID NO: 6470 - DNA, 25 bp, Artificial Sequence
  Primer
tacagccataacctttccacattcc

SEQ ID NO: 6471 - DNA, 19 bp, Artificial Sequence
  Primer
cctacaatgcctgcatcac

SEQ ID NO: 6472 - DNA, 22 bp, Artificial Sequence
  Primer
tgttagtgcagctactgaaaag

SEQ ID NO: 6473 - DNA, 22 bp, Artificial Sequence
  Primer
ccaccgtaaaacttgcttgttc

SEQ ID NO: 6474 - DNA, 21 bp, Artificial Sequence
  Primer
tttaacatatagtgagccgcc

SEQ ID NO: 6475 - DNA, 21 bp, Artificial Sequence
  Primer
acgcaggtaagcgtaaaactc

SEQ ID NO: 6476 - DNA, 22 bp, Artificial Sequence
  Primer
gaaagacatcagcatactcctg

SEQ ID NO: 6477 - DNA, 25 bp, Artificial Sequence
  Primer
cacataatggaaaactaatgggagg

SEQ ID NO: 6478 - DNA, 20 bp, Artificial Sequence
  Primer
acagcatcaccatagtcacc

SEQ ID NO: 6479 - DNA, 20 bp, Artificial Sequence
  Primer
gcaggatcgccaatatagac

SEQ ID NO: 6480 - DNA, 22 bp, Artificial Sequence
  Primer
cattttgaagcattgagctgac

SEQ ID NO: 6481 - DNA, 22 bp, Artificial Sequence
  Primer
cagacattatgcacaaaatgcc

SEQ ID NO: 6482 - DNA, 21 bp, Artificial Sequence
  Primer
catcaaagccaatccacgcac

SEQ ID NO: 6483 - DNA, 20 bp, Artificial Sequence
  Primer
ccacagaatgattccagcag

SEQ ID NO: 6484 - DNA, 22 bp, Artificial Sequence
  Primer
gaacttccattctacttcagcc

SEQ ID NO: 6485 - DNA, 23 bp, Artificial Sequence
  Primer
cacatacaaactaccaccatcac

SEQ ID NO: 6486 - DNA, 19 bp, Artificial Sequence
  Primer
tacgcttagcccaaagctc

SEQ ID NO: 6487 - DNA, 21 bp, Artificial Sequence
  Primer
ccttccactctaccatcaaac

SEQ ID NO: 6488 - DNA, 20 bp, Artificial Sequence
  Primer
agcagtgtaggcagcaatca

SEQ ID NO: 6489 - DNA, 35 bp, Artificial Sequence
  Primer
tatcgttgctgtagcatgaacagtacttgcaggag

SEQ ID NO: 6490 - DNA, 34 bp, Artificial Sequence
  Primer
tccaataggaatgtcgcactcataagaagtgtcg

SEQ ID NO: 6491 - DNA, 34 bp, Artificial Sequence
  Primer
gaagctattaaaatcacatggggatagcactact

SEQ ID NO: 6492 - DNA, 21 bp, Artificial Sequence
  Primer
aaataacacagaattcaccag

SEQ ID NO: 6493 - DNA, 22 bp, Artificial Sequence
  Primer
gtaaccattgacttggtaattc

SEQ ID NO: 6494 - DNA, 21 bp, Artificial Sequence
  Primer
tgcgagcaagaacaagagagg

SEQ ID NO: 6495 - DNA, 21 bp, Artificial Sequence
  Primer
catgtgtggcggctcactata

SEQ ID NO: 6496 - DNA, 21 bp, Artificial Sequence
  Primer
cctctcttgttcttgctcgca

SEQ ID NO: 6497 - DNA, 21 bp, Artificial Sequence
  Primer
tatagtgagccgccacacatg

SEQ ID NO: 6498 - DNA, 24 bp, Artificial Sequence
  Primer
tcacacttaggatagtcccaaccc

SEQ ID NO: 6499 - DNA, 22 bp, Artificial Sequence
  Primer
tgatgatggtgtttgtgtgtta

SEQ ID NO: 6500 - DNA, 24 bp, Artificial Sequence
  Primer
gggttgggactatcctaagtgtga

SEQ ID NO: 6501 - DNA, 22 bp, Artificial Sequence
  Primer
taacacacaaacaccatcatca

SEQ ID NO: 6502 - DNA, 23 bp, Artificial Sequence
  Primer
ggttgggactatcctaagtgtga

SEQ ID NO: 6503 - DNA, 24 bp, Artificial Sequence
  Primer
ccatcatcagatagaatcatcata

SEQ ID NO: 6504 - DNA, 26 bp, Artificial Sequence
  Primer
tcgttagctaacctgtagaaacggtg

SEQ ID NO: 6505 - DNA, 26 bp, Artificial Sequence
  Primer
ttttacgcttacctgcgtaaacattt

SEQ ID NO: 6506 - DNA, 26 bp, Artificial Sequence
  Primer
caccgtttctacaggttagctaacga

SEQ ID NO: 6507 - DNA, 26 bp, Artificial Sequence
  Primer
aaatgtttacgcaggtaagcgtaaaa

SEQ ID NO: 6508 - DNA, 17 bp, Artificial Sequence
  Primer
caacgctgaggtgtgta

SEQ ID NO: 6509 - DNA, 16 bp, Artificial Sequence
  Primer
attcgtcacgttcgtg

SEQ ID NO: 6510 - DNA, 17 bp, Artificial Sequence
  Primer
tacacacctcagcgttg

SEQ ID NO: 6511 - DNA, 16 bp, Artificial Sequence
  Primer
cacgaacgtgacgaat

SEQ ID NO: 6512 - DNA, 20 bp, Artificial Sequence
  Primer
aacagttacttggatgcctt

SEQ ID NO: 6513 - DNA, 20 bp, Artificial Sequence
  Primer
aaggcatccaagtaactgtt

SEQ ID NO: 6514 - DNA, 20 bp, Artificial Sequence
  Primer
ctatgatgggtttcaaaatg

SEQ ID NO: 6515 - DNA, 20 bp, Artificial Sequence
  Primer
cattttgaaacccatcatag

SEQ ID NO: 6516 - DNA, 20 bp, Artificial Sequence
  Primer
taaccatgaccaacattgcc

SEQ ID NO: 6517 - DNA, 20 bp, Artificial Sequence
  Primer
ggcaatgttggtcatggtta

SEQ ID NO: 6518 - DNA, 20 bp, Artificial Sequence
  Primer
acagctgtgctcagacaatg

SEQ ID NO: 6519 - DNA, 20 bp, Artificial Sequence
  Primer
cattgtctgagcacagctgt

SEQ ID NO: 6520 - DNA, 20 bp, Artificial Sequence
  Primer
agtgaccttgaccggtgcac

SEQ ID NO: 6521 - DNA, 20 bp, Artificial Sequence
  Primer
gtgcaccggtcaaggtcact

SEQ ID NO: 6522 - DNA, 20 bp, Artificial Sequence
  Primer
caataatactgcgtcttggt

SEQ ID NO: 6523 - DNA, 20 bp, Artificial Sequence
  Primer
accaagacgcagtattattg

SEQ ID NO: 6524 - DNA, 20 bp, Artificial Sequence
  Primer
tgaatacacccaaagaccac

SEQ ID NO: 6525 - DNA, 20 bp, Artificial Sequence
  Primer
gtggtctttgggtgtattca

SEQ ID NO: 6526 - DNA, 20 bp, Artificial Sequence
  Primer
cttggcactgatcccattga

SEQ ID NO: 6527 - DNA, 20 bp, Artificial Sequence
  Primer
tcaatgggatcagtgccaag

SEQ ID NO: 6528 - DNA, 18 bp, Artificial Sequence
  Primer
gttaacaaacatgcattc

SEQ ID NO: 6529 - DNA, 18 bp, Artificial Sequence
  Primer
gaatgcatgtttgttaac

SEQ ID NO: 6530 - DNA, 17 bp, Artificial Sequence
  Primer
aaatggccttggtatgt

SEQ ID NO: 6531 - DNA, 18 bp, Artificial Sequence
  Primer
ccatacataccaaggcca

SEQ ID NO: 6532 - DNA, 22 bp, Artificial Sequence
  Primer
gtggtagtgaccttgaccggtg

SEQ ID NO: 6533 - DNA, 19 bp, Artificial Sequence
  Primer
gttcctccttgccatgctg

SEQ ID NO: 6534 - DNA, 21 bp, Artificial Sequence
  Primer
gccttgaatacacccaaagac

SEQ ID NO: 6535 - DNA, 20 bp, Artificial Sequence
  Primer
actcgactccgcaagggagg

SEQ ID NO: 6536 - DNA, 20 bp, Artificial Sequence
  Primer
ggagtgcaccactgccatgc

SEQ ID NO: 6537 - DNA, 20 bp, Artificial Sequence
  Primer
gtttatcacccgcgaagaag

SEQ ID NO: 6538 - DNA, 20 bp, Artificial Sequence
  Primer
cttcttcgcgggtgataaac

SEQ ID NO: 6539 - DNA, 21 bp, Artificial Sequence
  Primer
caatgaagtactttgtcaaga

SEQ ID NO: 6540 - DNA, 21 bp, Artificial Sequence
  Primer
tcttgacaaagtacttcattg

SEQ ID NO: 6541 - DNA, 20 bp, Artificial Sequence
  Primer
caaaggctatcaagtgtgtg

SEQ ID NO: 6542 - DNA, 20 bp, Artificial Sequence
  Primer
cacacacttgatagcctttg

SEQ ID NO: 6543 - DNA, 20 bp, Artificial Sequence
  Primer
gttgattggtctgttgaata

SEQ ID NO: 6544 - DNA, 20 bp, Artificial Sequence
  Primer
tattcaacagaccaatcaac

SEQ ID NO: 6545 - DNA, 21 bp, Artificial Sequence
  Primer
ttcttttactattctgaatag

SEQ ID NO: 6546 - DNA, 21 bp, Artificial Sequence
  Primer
ctattcagaatagtaaaagaa

SEQ ID NO: 6547 - DNA, 20 bp, Artificial Sequence
  Primer
catcttataccactcatgta

SEQ ID NO: 6548 - DNA, 20 bp, Artificial Sequence
  Primer
tacatgagtggtataagatg

SEQ ID NO: 6549 - DNA, 20 bp, Artificial Sequence
  Primer
ctacttcatcagatacttat

SEQ ID NO: 6550 - DNA, 20 bp, Artificial Sequence
  Primer
ataagtatctgatgaagtag

SEQ ID NO: 6551 - DNA, 20 bp, Artificial Sequence
  Primer
atgatttctgctggatttag

SEQ ID NO: 6552 - DNA, 18 bp, Artificial Sequence
  Primer
ccagtgagcagagtgacg

SEQ ID NO: 6553 - DNA, 18 bp, Artificial Sequence
  Primer
cgtcactctgctcactgg

SEQ ID NO: 6554 - DNA, 18 bp, Artificial Sequence
  Primer
gaggactcgagctcaagc

SEQ ID NO: 6555 - DNA, 18 bp, Artificial Sequence
  Primer
gcttgagctcgagtcctc

SEQ ID NO: 6556 - DNA, 20 bp, Artificial Sequence
  Primer
tgagtaccgacagtacttgg

SEQ ID NO: 6557 - DNA, 20 bp, Artificial Sequence
  Primer
tcgctgctaatactgtaatc

SEQ ID NO: 6558 - DNA, 20 bp, Artificial Sequence
  Primer
actttctcgagctcgctatg

SEQ ID NO: 6559 - DNA, 20 bp, Artificial Sequence
  Primer
caacatgtccatccttacac

SEQ ID NO: 6560 - DNA, 23 bp, Artificial Sequence
  Primer
accccaatcaaaccaacgtagtg

SEQ ID NO: 6561 - DNA, 23 bp, Artificial Sequence
  Primer
cggtagtagccaatttggtcatc

SEQ ID NO: 6562 - DNA, 24 bp, Artificial Sequence
  Primer
atgaattaccaagtcaatggttac

SEQ ID NO: 6563 - DNA, 22 bp, Artificial Sequence
  Primer
ctgtagaaaatcctagctggag

SEQ ID NO: 6564 - DNA, 20 bp, Artificial Sequence
  Primer
gaagctattcgtcacgttcg

SEQ ID NO: 6565 - DNA, 22 bp, Artificial Sequence
  Primer
cataaccagtcggtacagctac

SEQ ID NO: 6566 - DNA, 24 bp, Artificial Sequence
  Primer
tcgtgcgtggattggctttgatgt

SEQ ID NO: 6567 - DNA, 22 bp, Artificial Sequence
  Primer
ctctagttgcatgacagccctc

SEQ ID NO: 6568 - DNA, 20 bp, Artificial Sequence
  Primer
ttatcacccgcgaagaagct

SEQ ID NO: 6569 - protein, 306 aa, SARS coronavirus
SGFRKMAFPSGKVEGCMVQVTCGTTTLNGLWLDDTVYCPRHVICTAEDMLNPNYEDLLIRKSNHSFLVQAGNVQLRVIGHSMQNCLLRLKVDTSNPKTPKYKFVRIQPGQTFSVLACYNGSPSGVYQCAMRPNHTIKGSFLNGSCGSVGFNIDYDCVSFCYMHHMELPTGVHAGTDLEGKFYGPFVDRQTAQAAGTDTTITLNVLAWLYAAVINGDRWFLNRFTTTLNDFNLVAMKYNYEPLTQDHVDILGPLSAQTGIAVLDMCAALKELLQNGMNGRTILGSTILEDEFTPFDVVRQCSGVTFQ

SEQ ID NO: 6570 - protein, 307 aa, Avian infectious bronchitis virus
SGFKKLVSPSSAVEKCIVSVSYRGNNLNGLWLGDTIYCPRHVLGKFSGDQWNDVLNLANNHEFEVTTQHGVTLNVVSRRLKGAVLILQTAVANAETPKYKFIKANCGDSFTIACAYGGTVVGLYPVTMRSNGTIRASFLAGACGSVGFNIEKGVVNFFYMHHLELPNALHTGTDLMGEFYGGYVDEEVAQRVPPDNLVTNNIVAWLYAAIISVKESSFSLPKWLESTTVSVDDYNKWAGDNGFTPFSTSTAITKLSAITGVDVCKLLRTIMVKNSQWGGDPILGQYNFEDELTPESVFNQIGGVRLQ

SEQ ID NO: 6571 - protein, 303 aa, Murine hepatitis virus
SGIVKMVSPTSKVEPCIVSVTYGNMTLNGLWLDDKVYCPRHVICSSADMTDPDYPNLLCRVTSSDFCVMSGRMSLTVMSYQMQGCQLVLTVTLQNPNTPKYSFGVVKPGETFTVLAAYNGRPQGAFHVTLRSSHTIKGSFLCGSCGSVGYVLTGDSVRFVYMHQLELSTGCHTGTDFSGNFYGPYRDAQVVQLPVQDYTQTVNVVAWLYAAIFNRCNWFVQSDSCSLEEFNVWAMTNGFSSIKADLVLDALASMTGVTVEQVLAAIKRLHSGFQGKQILGSCVLEDELTPSDVYQQLAGVKLQ

SEQ ID NO: 6572 - protein, 303 aa, Bovine coronavirus
SGIVKMVNPTSKVEPCIVSVTYGNMTLNGLWLDDKVYCPRHVICSASDMTNPDYTNLLCRVTSSDFTVLFDRLSLTVMSYQMQGCMLVLTVTLQNSRTPKYTFGVVKPGETFTVLAAYNGKPQGAFHVTMRSSYTIKGSFLCGSCGSVGYVLMGDCVKFVYMHQLELSTGCHTGTDFNGDFYGPYKDAQVVQLPVQDYIQSVNFVAWLYAAILNNCNWFVQSDKCSVEDFNVWALSNGFSQVKSDLVIDALASMTGVSLETLLAAIKRLKNGFQGRQIMGSCSFEDELTPSDVYQQLAGIKLQ

SEQ ID NO: 6573 - protein, 297 aa, Artificial Sequence
  Consensus sequence
SGIVKMVSPSSKVEPCIVSVTYGNMTLNGLWLDDKVYCPRHVICSAADMTNPDYNLLCRVTSSDFVLSGRVSLTVMSYQMQGCLLVLTVTLQNPKTPKYKFGVVKPGETFTVLAAYNGSPQGAFHVTMRSSHTIKGSFLCGSCGSVGFVIDGDCVKFVYMHQLELSTGCHTGTDLGDFYGPYVDAQVVQLPVQDYTQTVNVVAWLYAAIINCNWFLQSDTCSLEDFNVWAMSNGFSPIKSDLVIDALAAMTGVSVELLAAIKRLSGFQGRQILGSCILEDELTPSDVYQQLAGVKLQ

SEQ ID NO: 6574 - RNA, 8 nt, SARS coronavirus
ucumaacu

SEQ ID NO: 6575 - RNA, 7 nt, SARS coronavirus
ucuaaac

SEQ ID NO: 6576 - RNA, 7 nt, SARS coronavirus
cukaaca

SEQ ID NO: 6577 - RNA, 6 nt, SARS coronavirus
acgaac

SEQ ID NO: 6578 - DNA, 10077 bp, Artificial Sequence
  Expression plasmid
tcgcgcgtttcggtgatgacggtgaaaacctctgacacatgcagctcccggagacggtcacagcttgtctgtaagcggatgccgggagcagacaagcccgtcagggcgcgtcagcgggtgttggcgggtgtcggggctggcttaactatgcggcatcagagcagattgtactgagagtgcaccatatgaagctttttgcaaaagcctaggcctccaaaaaagcctcctcactacttctggaatagctcagaggccgaggcggcctcggcctctgcataaataaaaaaaattagtcagccatggggcggagaatgggcggaactgggcggggagggaattattggctattggccattgcatacgttgtatctatatcataatatgtacatttatattggctcatgtccaatatgaccgccatgttgacattgattattgactagttattaatagtaatcaattacggggtcattagttcatagcccatatatggagttccgcgttacataacttacggtaaatggcccgcctggctgaccgcccaacgacccccgcccattgacgtcaataatgacgtatgttcccatagtaacgccaatagggactttccattgacgtcaatgggtggagtatttacggtaaactgcccacttggcagtacatcaagtgtatcatatgccaagtccgccccctattgacgtcaatgacggtaaatggcccgcctggcattatgcccagtacatgaccttacgggactttcctacttggcagtacatctacgtattagtcatcgctattaccatggtgatgcggttttggcagtacaccaatgggcgtggatagcggtttgactcacggggatttccaagtctccaccccattgacgtcaatgggagtttgttttggcaccaaaatcaacgggactttccaaaatgtcgtaataaccccgccccgttgacgcaaatgggcggtaggcgtgtacggtgggaggtctatataagcagagctcgtttagtgaaccgtcagatcgcctggagacgccatccacgctgttttgacctccatagaagacaccgggaccgatccagcctccgcggccgggaacggtgcattggaacgcggattccccgtgccaagagtgacgtaagtaccgcctatagactctataggcacacccctttggctcttatgcatgctatactgtttttggcttggggcctatacacccccgctccttatgctataggtgatggtatagcttagcctataggtgtgggttattgaccattattgaccactcccctattggtgacgatactttccattactaatccataacatggctctttgccacaactatctctattggctatatgccaatactctgtccttcagagactgacacggactctgtatttttacaggatggggtccatttattatttacaaattcacatatacaacaacgccgtcccccgtgcccgcagtttttattaaacatagcgtgggatctccgacatctcgggtacgtgttccggacatgggctcttctccggtagcggcggagcttccacatccgagccctggtcccatccgtccagcggctcatggtcgctcggcagctccttgctcctaacagtggaggccagacttaggcacagcacaatgcccaccaccaccagtgtgccgcacaaggccgtggcggtagggtatgtgtctgaaaatgagctcggagattgggctcgcacctggacgcagatggaagacttaaggcagcggcagaagaagatgcaggcagctgagttgttgtattctgataagagtcagaggtaactcccgttgcggtgctgttaacggtggagggcagtgtagtctgagcagtactcgttgctgccgcgcgcgccaccagacataatagctgacagactaacagactgttcctttccatgggtcttttctgcagtcaccgtcgtcgaccggtcgcgaattcgtacgatatcggcgcgcctcgaggtcgaaggcgcgccgccaccatgttcatcttcctgctgttcctgactctcactagtggtagtgaccttgaccggtgcaccacttttgatgatgttcaagctcctaattacactcaacatacttcatctatgaggggggtttactatcctgatgaaatttttagatcagacactctttatttaactcaggatttatttcttccattttattctaatgttacagggtttcatactattaatcatacgtttggcaaccctgtcataccttttaaggatggtatttattttgctgccacagagaaatcaaatgttgtccgtggttgggtttttggttctaccatgaacaacaagtcacagtcggtgattattattaacaattctactaatgttgttatacgagcatgtaactttgaattgtgtgacaaccctttctttgctgtttctaaacccatgggtacacagacacatactatgatattcgataatgcatttaattgcactttcgagtacatatctgatgccttttcgcttgatgtttcagaaaagtcaggtaattttaaacacttacgagagtttgtgtttaaaaataaagatgggtttctctatgtttataagggctatcaacctatagatgtagttcgtgatctaccttctggttttaacactttgaaacctatttttaagttgcctcttggtattaacattacaaattttagagccattcttacagccttttcacctgctcaagacatttggggcacgtcagctgcagcctattttgttggctatttaaagccaactacatttatgctcaagtatgatgaaaatggtacaatcacagatgctgttgattgttctcaaaatccacttgctgaactcaaatgctctgttaagagctttgagattgacaaaggaatttaccagacctctaatttcagggttgttccctcaggagatgttgtgagattccctaatattacaaacttgtgtccttttggagaggtttttaatgctactaaattcccttctgtctatgcatgggagagaaaaaaaatttctaattgtgttgctgattactctgtgctctacaactcaacatttttttcaacctttaagtgctatggcgtttctgccactaagttgaatgatctttgcttctccaatgtctatgcagattcttttgtagtcaagggagatgatgtaagacaaatagcgccagggcaaactggtgttattgctgattataattataaattgccagatgatttcatgggttgtgtccttgcttggaatactaggaacattgatgctacttcaactggtaattataattataaatataggtatcttagacatggcaagcttaggccctttgagagagacatatctaatgtgcctttctcccctgatggcaaaccttgcaccccacctgctcttaattgttattggccattaaatgattatggtttttacaccactactggcattggctaccaaccttacagagttgtagtactttcttttgaacttttaaatgcaccggccacggtttgtggaccaaaattatccactgaccttattaagaaccagtgtgtcaattttaattttaatggactcactggtactggtgtgttaactccttcttcaaagagatttcaaccatttcaacaatttggccgtgatgtttctgatttcactgattccgttcgagatcctaaaacatctgaaatattagacatttcaccttgctcttttgggggtgtaagtgtaattacacctggaacaaatgcttcatctgaagttgctgttctatatcaagatgttaactgcactgatgtttctacagcaattcatgcagatcaactcacaccagcttggcgcatatattctactggaaacaatgtattccagactcaagcaggctgtcttataggagctgagcatgtcgacacttcttatgagtgcgacattcctattggagctggcatttgtgctagttaccatacagtttctttattacgtagtactagccaaaaatctattgtggcttatactatgtctttaggtgctgatagttcaattgcttactctaataacaccattgctatacctactaacttttcaattagcattactacagaagtaatgcctgtttctatggctaaaacctccgtagattgtaatatgtacatctgcggagattctactgaatgtgctaatttgcttctccaatatggtagcttttgcacacaactaaatcgtgcactctcaggtattgctgctgaacaggatcgcaacacacgtgaagtgttcgctcaagtcaaacaaatgtacaaaaccccaactttgaaatattttggtggttttaatttttcacaaatattacctgaccctctaaagccaactaagaggtcttttattgaggacttgctctttaataaggtgacactcgctgatgctggcttcatgaagcaatatggcgaatgcctaggtgatattaatgctagagatctcatttgtgcgcagaagttcaatggacttacagtgttgccacctctgctcactgatgatatgattgctgcctacactgctgctctagttagtggtactgccactgctggatggacatttggtgctggcgctgctcttcaaataccttttgctatgcaaatggcatataggttcaatggcattggagttacccaaaatgttctctatgagaaccaaaaacaaatcgccaaccaatttaacaaggcgattagtcaaattcaagaatcacttacaacaacatcaactgcattgggcaagctgcaagacgttgttaaccagaatgctcaagcattaaacacacttgttaaacaacttagctctaattttggtgcaatttcaagtgtgctaaatgatatcctttcgcgacttgataaagtcgaggcggaggtacaaattgacaggttaattacaggcagacttcaaagccttcaaacctatgtaacacaacaactaatcagggctgctgaaatcagggcttctgctaatcttgctgctactaaaatgtctgagtgtgttcttggacaatcaaaaagagttgacttttgtggaaagggctaccaccttatgtccttcccacaagcagccccgcatggtgttgtcttcctacatgtcacgtatgtgccatcccaggagaggaacttcaccacagcgccagcaatttgtcatgaaggcaaagcatacttccctcgtgaaggtgtttttgtgtttaatggcacttcttggtttattacacagaggaacttcttttctccacaaataattactacagacaatacatttgtctcaggaaattgtgatgtcgttattggcatcattaacaacacagtttatgatcctctgcaacctgagcttgactcattcaaagaagagctggacaagtacttcaaaaatcatacatcaccagatgttgattttggcgacatttcaggcattaacgcttctgtcgtcaacattcaaaaagaaattgaccgcctcaatgaggtcgctaaaaatttaaatgaatcactcattgaccttcaagaattgggaaaatatgagcaatatattaaatggccttggtatgtttggctcggcttcattgctggactaattgccatcgtcatggttacaatcttgctttgttgcatgactagttgttgcagttgcctcaagggtgcatgctcttgtggttcttgctgcaagtttgatgaggatgactctgagccagttctcaagggtgtcaaattacattacacacaccaccaccaccaccactaatcgatgcggccgcatcgatagatctcccgggtctagagggagaccacaacggtttccctctagcgggatcaattccgcccccccccctaacgttactggccgaagccgcttggaataaggccggtgtgcgtttgtctatatgttattttccaccatattgccgtcttttggcaatgtgagggcccggaaacctggccctgtcttcttgacgagcattcctaggggtctttcccctctcgccaaaggaatgcaaggtctgttgaatgtcgtgaaggaagcagttcctctggaagcttcttgaagacaaacaacgtctgtagcgaccctttgcaggcagcggaaccccccacctggcgacaggtgcctctgcggccaaaagccacgtgtataagatacacctgcaaaggcggcacaaccccagtgccacgttgtgagttggatagttgtggaaagagtcaaatggctctcctcaagcgtattcaacaaggggctgaaggatgcccagaaggtaccccattgtatgggatctgatctggggcctcggtgcacatgctttacatgtgtttagtcgaggttaaaaaacgtctaggccccccgaaccacggggacgtggttttcctttgaaaaacacgataataccatggttcgaccattgaactgcatcgtcgccgtgtcccaaaatatggggattggcaagaacggagacctaccctggcctccgctcaggaacgagttcaagtacttccaaagaatgaccacaacctcttcagtggaaggtaaacagaatctggtgattatgggtaggaaaacctggttctccattcctgagaagaatcgacctttaaaggacagaattaatatagttctcagtagagaactcaaagaaccaccacgaggagctcattttcttgccaaaagtttggatgatgccttaagacttattgaacaaccggaattggcaagtaaagtagacatggtttggatagtcggaggcagttctgtttaccaggaagccatgaatcaaccaggccacctcagactctttgtgacaaggatcatgcaggaatttgaaagtgacacgtttttcccagaaattgatttggggaaatataaacttctcccagaatacccaggcgtcctctctgaggtccaggaggaaaaaggcatcaagtataagtttgaagtctacgagaagaaagacggaggaggatccatgattgaacaagatggattgcacgcaggttctccggccgcttgggtggagaggctattcggctatgactgggcacaacagacaatcggctgctctgatgccgccgtgttccggctgtcagcgcaggggcgcccggttctttttgtcaagaccgacctgtccggtgccctgaatgaactgcaggacgaggcagcgcggctatcgtggctggccacgacgggcgttccttgcgcagctgtgctcgacgttgtcactgaagcgggaagggactggctgctattgggcgaagtgccggggcaggatctcctgtcatctcaccttgctcctgccgagaaagtatccatcatggctgatgcaatgcggcggctgcatacgcttgatccggctacctgcccattcgaccaccaagcgaaacatcgcatcgagcgagcacgtactcggatggaagccggtcttgtcgatcaggatgatctggacgaagagcatcaggggctcgcgccagccgaactgttcgccaggctcaaggcgcgcatgcccgacggcgaggatctcgtcgtgacccatggcgatgcctgcttgccgaatatcatggtggaaaatggccgcttttctggattcatcgactgtggccggctgggtgtggcggaccgctatcaggacatagcgttggctacccgtgatattgctgaagagcttggcggcgaatgggctgaccgcttcctcgtgctttacggtatcgccgctcccgattcgcagcgcatcgccttctatcgccttcttgacgagttcttctgaggatccactacgcgttagagctcgctgatcagcctcgactgtgccttctagttgccagccatctgttgtttgcccctcccccgtgccttccttgaccctggaaggtgccactcccactgtcctttcctaataaaatgaggaaattgcatcgcattgtctgagtaggtgtcattctattctggggggtggggtggggcaggacagcaagggggaggattgggaagacaatagcaggcatgctggggagctcttccgcttcctcgctcactgactcgctgcgctcggtcgttcggctgcggcgagcggtatcagctcactcaaaggcggtaatacggttatccacagaatcaggggataacgcaggaaagaacatgtgagcaaaaggccagcaaaaggccaggaaccgtaaaaaggccgcgttgctggcgtttttccataggctccgcccccctgacgagcatcacaaaaatcgacgctcaagtcagaggtggcgaaacccgacaggactataaagataccaggcgtttccccctggaagctccctcgtgcgctctcctgttccgaccctgccgcttaccggatacctgtccgcctttctcccttcgggaagcgtggcgctttctcaatgctcacgctgtaggtatctcagttcggtgtaggtcgttcgctccaagctgggctgtgtgcacgaaccccccgttcagcccgaccgctgcgccttatccggtaactatcgtcttgagtccaacccggtaagacacgacttatcgccactggcagcagccactggtaacaggattagcagagcgaggtatgtaggcggtgctacagagttcttgaagtggtggcctaactacggctacactagaaggacagtatttggtatctgcgctctgctgaagccagttaccttcggaaaaagagttggtagctcttgatccggcaaacaaaccaccgctggtagcggtggtttttttgtttgcaagcagcagattacgcgcagaaaaaaaggatctcaagaagatcctttgatcttttctacggggtctgacgctcagtggaacgaaaactcacgttaagggattttggtcatgagattatcaaaaaggatcttcacctagatccttttaaattaaaaatgaagttttaaatcaatctaaagtatatatgagtaaacttggtctgacagttaccaatgcttaatcagtgaggcacctatctcagcgatctgtctatttcgttcatccatagttgcctgactccccgtcgtgtagataactacgatacgggagggcttaccatctggccccagtgctgcaatgataccgcgagacccacgctcaccggctccagatttatcagcaataaaccagccagccggaagggccgagcgcagaagtggtcctgcaactttatccgcctccatccagtctattaattgttgccgggaagctagagtaagtagttcgccagttaatagtttgcgcaacgttgttgccattgctacaggcatcgtggtgtcacgctcgtcgtttggtatggcttcattcagctccggttcccaacgatcaaggcgagttacatgatcccccatgttgtgcaaaaaagcggttagctccttcggtcctccgatcgttgtcagaagtaagttggccgcagtgttatcactcatggttatggcagcactgcataattctcttactgtcatgccatccgtaagatgcttttctgtgactggtgagtactcaaccaagtcattctgagaatagtgtatgcggcgaccgagttgctcttgcccggcgtcaatacgggataataccgcgccacatagcagaactttaaaagtgctcatcattggaaaacgttcttcggggcgaaaactctcaaggatcttaccgctgttgagatccagttcgatgtaacccactcgtgcacccaactgatcttcagcatcttttactttcaccagcgtttctgggtgagcaaaaacaggaaggcaaaatgccgcaaaaaagggaataagggcgacacggaaatgttgaatactcatactcttcctttttcaatattattgaagcatttatcagggttattgtctcatgagcggatacatatttgaatgtatttagaaaaataaacaaataggggttccgcgcacatttccccgaaaagtgccacctgacgtctaagaaaccattattatcatgacattaacctataaaaataggcgtatcacgaggccctttcgtc

SEQ ID NO: 6579 - DNA, 10054 bp, Expression plasmid
tcgcgcgtttcggtgatgacggtgaaaacctctgacacatgcagctcccggagacggtcacagcttgtctgtaagcggatgccgggagcagacaagcccgtcagggcgcgtcagcgggtgttggcgggtgtcggggctggcttaactatgcggcatcagagcagattgtactgagagtgcaccatatgaagctttttgcaaaagcctaggcctccaaaaaagcctcctcactacttctggaatagctcagaggccgaggcggcctcggcctctgcataaataaaaaaaattagtcagccatggggcggagaatgggcggaactgggcggggagggaattattggctattggccattgcatacgttgtatctatatcataatatgtacatttatattggctcatgtccaatatgaccgccatgttgacattgattattgactagttattaatagtaatcaattacggggtcattagttcatagcccatatatggagttccgcgttacataacttacggtaaatggcccgcctggctgaccgcccaacgacccccgcccattgacgtcaataatgacgtatgttcccatagtaacgccaatagggactttccattgacgtcaatgggtggagtatttacggtaaactgcccacttggcagtacatcaagtgtatcatatgccaagtccgccccctattgacgtcaatgacggtaaatggcccgcctggcattatgcccagtacatgaccttacgggactttcctacttggcagtacatctacgtattagtcatcgctattaccatggtgatgcggttttggcagtacaccaatgggcgtggatagcggtttgactcacggggatttccaagtctccaccccattgacgtcaatgggagtttgttttggcaccaaaatcaacgggactttccaaaatgtcgtaataaccccgccccgttgacgcaaatgggcggtaggcgtgtacggtgggaggtctatataagcagagctcgtttagtgaaccgtcagatcgcctggagacgccatccacgctgttttgacctccatagaagacaccgggaccgatccagcctccgcggccgggaacggtgcattggaacgcggattccccgtgccaagagtgacgtaagtaccgcctatagactctataggcacacccctttggctcttatgcatgctatactgtttttggcttggggcctatacacccccgctccttatgctataggtgatggtatagcttagcctataggtgtgggttattgaccattattgaccactcccctattggtgacgatactttccattactaatccataacatggctctttgccacaactatctctattggctatatgccaatactctgtccttcagagactgacacggactctgtatttttacaggatggggtccatttattatttacaaattcacatatacaacaacgccgtcccccgtgcccgcagtttttattaaacatagcgtgggatctccgacatctcgggtacgtgttccggacatgggctcttctccggtagcggcggagcttccacatccgagccctggtcccatccgtccagcggctcatggtcgctcggcagctccttgctcctaacagtggaggccagacttaggcacagcacaatgcccaccaccaccagtgtgccgcacaaggccgtggcggtagggtatgtgtctgaaaatgagctcggagattgggctcgcacctggacgcagatggaagacttaaggcagcggcagaagaagatgcaggcagctgagttgttgtattctgataagagtcagaggtaactcccgttgcggtgctgttaacggtggagggcagtgtagtctgagcagtactcgttgctgccgcgcgcgccaccagacataatagctgacagactaacagactgttcctttccatgggtcttttctgcagtcaccgtcgtcgaccggtcgcgaattcgtacgatatcggcgcgcctcgaggtcgaaggcgcgccgccaccatgttcatcttcctgctgttcctgactctcactagtggtagtgaccttgaccggtgcaccacttttgatgatgttcaagctcctaattacactcaacatacttcatctatgaggggggtttactatcctgatgaaatttttagatcagacactctttatttaactcaggatttatttcttccattttattctaatgttacagggtttcatactattaatcatacgtttggcaaccctgtcataccttttaaggatggtatttattttgctgccacagagaaatcaaatgttgtccgtggttgggtttttggttctaccatgaacaacaagtcacagtcggtgattattattaacaattctactaatgttgttatacgagcatgtaactttgaattgtgtgacaaccctttctttgctgtttctaaacccatgggtacacagacacatactatgatattcgataatgcatttaattgcactttcgagtacatatctgatgccttttcgcttgatgtttcagaaaagtcaggtaattttaaacacttacgagagtttgtgtttaaaaataaagatgggtttctctatgtttataagggctatcaacctatagatgtagttcgtgatctaccttctggttttaacactttgaaacctatttttaagttgcctcttggtattaacattacaaattttagagccattcttacagccttttcacctgctcaagacatttggggcacgtcagctgcagcctattttgttggctatttaaagccaactacatttatgctcaagtatgatgaaaatggtacaatcacagatgctgttgattgttctcaaaatccacttgctgaactcaaatgctctgttaagagctttgagattgacaaaggaatttaccagacctctaatttcagggttgttccctcaggagatgttgtgagattccctaatattacaaacttgtgtccttttggagaggtttttaatgctactaaattcccttctgtctatgcatgggagagaaaaaaaatttctaattgtgttgctgattactctgtgctctacaactcaacatttttttcaacctttaagtgctatggcgtttctgccactaagttgaatgatctttgcttctccaatgtctatgcagattcttttgtagtcaagggagatgatgtaagacaaatagcgccagggcaaactggtgttattgctgattataattataaattgccagatgatttcatgggttgtgtccttgcttggaatactaggaacattgatgctacttcaactggtaattataattataaatataggtatcttagacatggcaagcttaggccctttgagagagacatatctaatgtgcctttctcccctgatggcaaaccttgcaccccacctgctcttaattgttattggccattaaatgattatggtttttacaccactactggcattggctaccaaccttacagagttgtagtactttcttttgaacttttaaatgcaccggccacggtttgtggaccaaaattatccactgaccttattaagaaccagtgtgtcaattttaattttaatggactcactggtactggtgtgttaactccttcttcaaagagatttcaaccatttcaacaatttggccgtgatgtttctgatttcactgattccgttcgagatcctaaaacatctgaaatattagacatttcaccttgctcttttgggggtgtaagtgtaattacacctggaacaaatgcttcatctgaagttgctgttctatatcaagatgttaactgcactgatgtttctacagcaattcatgcagatcaactcacaccagcttggcgcatatattctactggaaacaatgtattccagactcaagcaggctgtcttataggagctgagcatgtcgacacttcttatgagtgcgacattcctattggagctggcatttgtgctagttaccatacagtttctttattacgtagtactagccaaaaatctattgtggcttatactatgtctttaggtgctgatagttcaattgcttactctaataacaccattgctatacctactaacttttcaattagcattactacagaagtaatgcctgtttctatggctaaaacctccgtagattgtaatatgtacatctgcggagattctactgaatgtgctaatttgcttctccaatatggtagcttttgcacacaactaaatcgtgcactctcaggtattgctgctgaacaggatcgcaacacacgtgaagtgttcgctcaagtcaaacaaatgtacaaaaccccaactttgaaatattttggtggttttaatttttcacaaatattacctgaccctctaaagccaactaagaggtcttttattgaggacttgctctttaataaggtgacactcgctgatgctggcttcatgaagcaatatggcgaatgcctaggtgatattaatgctagagatctcatttgtgcgcagaagttcaatggacttacagtgttgccacctctgctcactgatgatatgattgctgcctacactgctgctctagttagtggtactgccactgctggatggacatttggtgctggcgctgctcttcaaataccttttgctatgcaaatggcatataggttcaatggcattggagttacccaaaatgttctctatgagaaccaaaaacaaatcgccaaccaatttaacaaggcgattagtcaaattcaagaatcacttacaacaacatcaactgcattgggcaagctgcaagacgttgttaaccagaatgctcaagcattaaacacacttgttaaacaacttagctctaattttggtgcaatttcaagtgtgctaaatgatatcctttcgcgacttgataaagtcgaggcggaggtacaaattgacaggttaattacaggcagacttcaaagccttcaaacctatgtaacacaacaactaatcagggctgctgaaatcagggcttctgctaatcttgctgctactaaaatgtctgagtgtgttcttggacaatcaaaaagagttgacttttgtggaaagggctaccaccttatgtccttcccacaagcagccccgcatggtgttgtcttcctacatgtcacgtatgtgccatcccaggagaggaacttcaccacagcgccagcaatttgtcatgaaggcaaagcatacttccctcgtgaaggtgtttttgtgtttaatggcacttcttggtttattacacagaggaacttcttttctccacaaataattactacagacaatacatttgtctcaggaaattgtgatgtcgttattggcatcattaacaacacagtttatgatcctctgcaacctgagcttgactcattcaaagaagagctggacaagtacttcaaaaatcatacatcaccagatgttgattttggcgacatttcaggcattaacgcttctgtcgtcaacattcaaaaagaaattgaccgcctcaatgaggtcgctaaaaatttaaatgaatcactcattgaccttcaagaattgggaaaatatgagcaatatattaaatggccttggtatgtttggctcggcttcattgctggactaattgccatcgtcatggttacaatcttgctttgttgcatgactagttgttgcagttgcctcaagggtgcatgctcttgtggttcttgctgcaagtttgatgaggatgactctgagccagttctcaagggtgtcaaattacattacacataagcggccgcatcgatagatctcccgggtctagagggagaccacaacggtttccctctagcgggatcaattccgcccccccccctaacgttactggccgaagccgcttggaataaggccggtgtgcgtttgtctatatgttattttccaccatattgccgtcttttggcaatgtgagggcccggaaacctggccctgtcttcttgacgagcattcctaggggtctttcccctctcgccaaaggaatgcaaggtctgttgaatgtcgtgaaggaagcagttcctctggaagcttcttgaagacaaacaacgtctgtagcgaccctttgcaggcagcggaaccccccacctggcgacaggtgcctctgcggccaaaagccacgtgtataagatacacctgcaaaggcggcacaaccccagtgccacgttgtgagttggatagttgtggaaagagtcaaatggctctcctcaagcgtattcaacaaggggctgaaggatgcccagaaggtaccccattgtatgggatctgatctggggcctcggtgcacatgctttacatgtgtttagtcgaggttaaaaaacgtctaggccccccgaaccacggggacgtggttttcctttgaaaaacacgataataccatggttcgaccattgaactgcatcgtcgccgtgtcccaaaatatggggattggcaagaacggagacctaccctggcctccgctcaggaacgagttcaagtacttccaaagaatgaccacaacctcttcagtggaaggtaaacagaatctggtgattatgggtaggaaaacctggttctccattcctgagaagaatcgacctttaaaggacagaattaatatagttctcagtagagaactcaaagaaccaccacgaggagctcattttcttgccaaaagtttggatgatgccttaagacttattgaacaaccggaattggcaagtaaagtagacatggtttggatagtcggaggcagttctgtttaccaggaagccatgaatcaaccaggccacctcagactctttgtgacaaggatcatgcaggaatttgaaagtgacacgtttttcccagaaattgatttggggaaatataaacttctcccagaatacccaggcgtcctctctgaggtccaggaggaaaaaggcatcaagtataagtttgaagtctacgagaagaaagacggaggaggatccatgattgaacaagatggattgcacgcaggttctccggccgcttgggtggagaggctattcggctatgactgggcacaacagacaatcggctgctctgatgccgccgtgttccggctgtcagcgcaggggcgcccggttctttttgtcaagaccgacctgtccggtgccctgaatgaactgcaggacgaggcagcgcggctatcgtggctggccacgacgggcgttccttgcgcagctgtgctcgacgttgtcactgaagcgggaagggactggctgctattgggcgaagtgccggggcaggatctcctgtcatctcaccttgctcctgccgagaaagtatccatcatggctgatgcaatgcggcggctgcatacgcttgatccggctacctgcccattcgaccaccaagcgaaacatcgcatcgagcgagcacgtactcggatggaagccggtcttgtcgatcaggatgatctggacgaagagcatcaggggctcgcgccagccgaactgttcgccaggctcaaggcgcgcatgcccgacggcgaggatctcgtcgtgacccatggcgatgcctgcttgccgaatatcatggtggaaaatggccgcttttctggattcatcgactgtggccggctgggtgtggcggaccgctatcaggacatagcgttggctacccgtgatattgctgaagagcttggcggcgaatgggctgaccgcttcctcgtgctttacggtatcgccgctcccgattcgcagcgcatcgccttctatcgccttcttgacgagttcttctgaggatccactacgcgttagagctcgctgatcagcctcgactgtgccttctagttgccagccatctgttgtttgcccctcccccgtgccttccttgaccctggaaggtgccactcccactgtcctttcctaataaaatgaggaaattgcatcgcattgtctgagtaggtgtcattctattctggggggtggggtggggcaggacagcaagggggaggattgggaagacaatagcaggcatgctggggagctcttccgcttcctcgctcactgactcgctgcgctcggtcgttcggctgcggcgagcggtatcagctcactcaaaggcggtaatacggttatccacagaatcaggggataacgcaggaaagaacatgtgagcaaaaggccagcaaaaggccaggaaccgtaaaaaggccgcgttgctggcgtttttccataggctccgcccccctgacgagcatcacaaaaatcgacgctcaagtcagaggtggcgaaacccgacaggactataaagataccaggcgtttccccctggaagctccctcgtgcgctctcctgttccgaccctgccgcttaccggatacctgtccgcctttctcccttcgggaagcgtggcgctttctcaatgctcacgctgtaggtatctcagttcggtgtaggtcgttcgctccaagctgggctgtgtgcacgaaccccccgttcagcccgaccgctgcgccttatccggtaactatcgtcttgagtccaacccggtaagacacgacttatcgccactggcagcagccactggtaacaggattagcagagcgaggtatgtaggcggtgctacagagttcttgaagtggtggcctaactacggctacactagaaggacagtatttggtatctgcgctctgctgaagccagttaccttcggaaaaagagttggtagctcttgatccggcaaacaaaccaccgctggtagcggtggtttttttgtttgcaagcagcagattacgcgcagaaaaaaaggatctcaagaagatcctttgatcttttctacggggtctgacgctcagtggaacgaaaactcacgttaagggattttggtcatgagattatcaaaaaggatcttcacctagatccttttaaattaaaaatgaagttttaaatcaatctaaagtatatatgagtaaacttggtctgacagttaccaatgcttaatcagtgaggcacctatctcagcgatctgtctatttcgttcatccatagttgcctgactccccgtcgtgtagataactacgatacgggagggcttaccatctggccccagtgctgcaatgataccgcgagacccacgctcaccggctccagatttatcagcaataaaccagccagccggaagggccgagcgcagaagtggtcctgcaactttatccgcctccatccagtctattaattgttgccgggaagctagagtaagtagttcgccagttaatagtttgcgcaacgttgttgccattgctacaggcatcgtggtgtcacgctcgtcgtttggtatggcttcattcagctccggttcccaacgatcaaggcgagttacatgatcccccatgttgtgcaaaaaagcggttagctccttcggtcctccgatcgttgtcagaagtaagttggccgcagtgttatcactcatggttatggcagcactgcataattctcttactgtcatgccatccgtaagatgcttttctgtgactggtgagtactcaaccaagtcattctgagaatagtgtatgcggcgaccgagttgctcttgcccggcgtcaatacgggataataccgcgccacatagcagaactttaaaagtgctcatcattggaaaacgttcttcggggcgaaaactctcaaggatcttaccgctgttgagatccagttcgatgtaacccactcgtgcacccaactgatcttcagcatcttttactttcaccagcgtttctgggtgagcaaaaacaggaaggcaaaatgccgcaaaaaagggaataagggcgacacggaaatgttgaatactcatactcttcctttttcaatattattgaagcatttatcagggttattgtctcatgagcggatacatatttgaatgtatttagaaaaataaacaaataggggttccgcgcacatttccccgaaaagtgccacctgacgtctaagaaaccattattatcatgacattaacctataaaaataggcgtatcacgaggccctttcgtc

SEQ ID NO: 6580 - DNA, 9892 bp, Expression plasmid
tcgcgcgtttcggtgatgacggtgaaaacctctgacacatgcagctcccggagacggtcacagcttgtctgtaagcggatgccgggagcagacaagcccgtcagggcgcgtcagcgggtgttggcgggtgtcggggctggcttaactatgcggcatcagagcagattgtactgagagtgcaccatatgaagctttttgcaaaagcctaggcctccaaaaaagcctcctcactacttctggaatagctcagaggccgaggcggcctcggcctctgcataaataaaaaaaattagtcagccatggggcggagaatgggcggaactgggcggggagggaattattggctattggccattgcatacgttgtatctatatcataatatgtacatttatattggctcatgtccaatatgaccgccatgttgacattgattattgactagttattaatagtaatcaattacggggtcattagttcatagcccatatatggagttccgcgttacataacttacggtaaatggcccgcctggctgaccgcccaacgacccccgcccattgacgtcaataatgacgtatgttcccatagtaacgccaatagggactttccattgacgtcaatgggtggagtatttacggtaaactgcccacttggcagtacatcaagtgtatcatatgccaagtccgccccctattgacgtcaatgacggtaaatggcccgcctggcattatgcccagtacatgaccttacgggactttcctacttggcagtacatctacgtattagtcatcgctattaccatggtgatgcggttttggcagtacaccaatgggcgtggatagcggtttgactcacggggatttccaagtctccaccccattgacgtcaatgggagtttgttttggcaccaaaatcaacgggactttccaaaatgtcgtaataaccccgccccgttgacgcaaatgggcggtaggcgtgtacggtgggaggtctatataagcagagctcgtttagtgaaccgtcagatcgcctggagacgccatccacgctgttttgacctccatagaagacaccgggaccgatccagcctccgcggccgggaacggtgcattggaacgcggattccccgtgccaagagtgacgtaagtaccgcctatagactctataggcacacccctttggctcttatgcatgctatactgtttttggcttggggcctatacacccccgctccttatgctataggtgatggtatagcttagcctataggtgtgggttattgaccattattgaccactcccctattggtgacgatactttccattactaatccataacatggctctttgccacaactatctctattggctatatgccaatactctgtccttcagagactgacacggactctgtatttttacaggatggggtccatttattatttacaaattcacatatacaacaacgccgtcccccgtgcccgcagtttttattaaacatagcgtgggatctccgacatctcgggtacgtgttccggacatgggctcttctccggtagcggcggagcttccacatccgagccctggtcccatccgtccagcggctcatggtcgctcggcagctccttgctcctaacagtggaggccagacttaggcacagcacaatgcccaccaccaccagtgtgccgcacaaggccgtggcggtagggtatgtgtctgaaaatgagctcggagattgggctcgcacctggacgcagatggaagacttaaggcagcggcagaagaagatgcaggcagctgagttgttgtattctgataagagtcagaggtaactcccgttgcggtgctgttaacggtggagggcagtgtagtctgagcagtactcgttgctgccgcgcgcgccaccagacataatagctgacagactaacagactgttcctttccatgggtcttttctgcagtcaccgtcgtcgaccggtcgcgaattcgtacgatatcggcgcgcctcgaggtcgaaggcgcgccgccaccatgttcatcttcctgctgttcctgactctcactagtggtagtgaccttgaccggtgcaccacttttgatgatgttcaagctcctaattacactcaacatacttcatctatgaggggggtttactatcctgatgaaatttttagatcagacactctttatttaactcaggatttatttcttccattttattctaatgttacagggtttcatactattaatcatacgtttggcaaccctgtcataccttttaaggatggtatttattttgctgccacagagaaatcaaatgttgtccgtggttgggtttttggttctaccatgaacaacaagtcacagtcggtgattattattaacaattctactaatgttgttatacgagcatgtaactttgaattgtgtgacaaccctttctttgctgtttctaaacccatgggtacacagacacatactatgatattcgataatgcatttaattgcactttcgagtacatatctgatgccttttcgcttgatgtttcagaaaagtcaggtaattttaaacacttacgagagtttgtgtttaaaaataaagatgggtttctctatgtttataagggctatcaacctatagatgtagttcgtgatctaccttctggttttaacactttgaaacctatttttaagttgcctcttggtattaacattacaaattttagagccattcttacagccttttcacctgctcaagacatttggggcacgtcagctgcagcctattttgttggctatttaaagccaactacatttatgctcaagtatgatgaaaatggtacaatcacagatgctgttgattgttctcaaaatccacttgctgaactcaaatgctctgttaagagctttgagattgacaaaggaatttaccagacctctaatttcagggttgttccctcaggagatgttgtgagattccctaatattacaaacttgtgtccttttggagaggtttttaatgctactaaattcccttctgtctatgcatgggagagaaaaaaaatttctaattgtgttgctgattactctgtgctctacaactcaacatttttttcaacctttaagtgctatggcgtttctgccactaagttgaatgatctttgcttctccaatgtctatgcagattcttttgtagtcaagggagatgatgtaagacaaatagcgccaggacaaactggtgttattgctgattataattataaattgccagatgatttcatgggttgtgtccttgcttggaatactaggaacattgatgctacttcaactggtaattataattataaatataggtatcttagacatggcaagcttaggccctttgagagagacatatctaatgtgcctttctcccctgatggcaaaccttgcaccccacctgctcttaattgttattggccattaaatgattatggtttttacaccactactggcattggctaccaaccttacagagttgtagtactttcttttgaacttttaaatgcaccggccacggtttgtggaccaaaattatccactgaccttattaagaaccagtgtgtcaattttaattttaatggactcactggtactggtgtgttaactccttcttcaaagagatttcaaccatttcaacaatttggccgtgatgtttctgatttcactgattccgttcgagatcctaaaacatctgaaatattagacatttcaccttgctcttttgggggtgtaagtgtaattacacctggaacaaatgcttcatctgaagttgctgttctatatcaagatgttaactgcactgatgtttctacagcaattcatgcagatcaactcacaccagcttggcgcatatattctactggaaacaatgtattccagactcaagcaggctgtcttataggagctgagcatgtcgacacttcttatgagtgcgacattcctattggagctggcatttgtgctagttaccatacagtttctttattacgtagtactagccaaaaatctattgtggcttatactatgtctttaggtgctgatagttcaattgcttactctaataacaccattgctatacctactaacttttcaattagcattactacagaagtaatgcctgtttctatggctaaaacctccgtagattgtaatatgtacatctgcggagattctactgaatgtgctaatttgcttctccaatatggtagcttttgcacacaactaaatcgtgcactctcaggtattgctgctgaacaggatcgcaacacacgtgaagtgttcgctcaagtcaaacaaatgtacaaaaccccaactttgaaatattttggtggttttaatttttcacaaatattacctgaccctctaaagccaactaagaggtcttttattgaggacttgctctttaataaggtgacactcgctgatgctggcttcatgaagcaatatggcgaatgcctaggtgatattaatgctagagatctcatttgtgcgcagaagttcaatggacttacagtgttgccacctctgctcactgatgatatgattgctgcctacactgctgctctagttagtggtactgccactgctggatggacatttggtgctggcgctgctcttcaaataccttttgctatgcaaatggcatataggttcaatggcattggagttacccaaaatgttctctatgagaaccaaaaacaaatcgccaaccaatttaacaaggcgattagtcaaattcaagaatcacttacaacaacatcaactgcattgggcaagctgcaagacgttgttaaccagaatgctcaagcattaaacacacttgttaaacaacttagctctaattttggtgcaatttcaagtgtgctaaatgatatcctttcgcgacttgataaagtcgaggcggaggtacaaattgacaggttaattacaggcagacttcaaagccttcaaacctatgtaacacaacaactaatcagggctgctgaaatcagggcttctgctaatcttgctgctactaaaatgtctgagtgtgttcttggacaatcaaaaagagttgacttttgtggaaagggctaccaccttatgtccttcccacaagcagccccgcatggtgttgtcttcctacatgtcacgtatgtgccatcccaggagaggaacttcaccacagcgccagcaatttgtcatgaaggcaaagcatacttccctcgtgaaggtgtttttgtgtttaatggcacttcttggtttattacacagaggaacttcttttctccacaaataattactacagacaatacatttgtctcaggaaattgtgatgtcgttattggcatcattaacaacacagtttatgatcctctgcaacctgagcttgactcattcaaagaagagctggacaagtacttcaaaaatcatacatcaccagatgttgattttggcgacatttcaggcattaacgcttctgtcgtcaacattcaaaaagaaattgaccgcctcaatgaggtcgctaaaaatttaaatgaatcactcattgaccttcaagaattgggaaaatatgagcaatatattaaatggcctcaccaccaccaccaccactaagcggccgcatcgatagatctcccgggtctagagggagaccacaacggtttccctctagcgggatcaattccgcccccccccctaacgttactggccgaagccgcttggaataaggccggtgtgcgtttgtctatatgttattttccaccatattgccgtcttttggcaatgtgagggcccggaaacctggccctgtcttcttgacgagcattcctaggggtctttcccctctcgccaaaggaatgcaaggtctgttgaatgtcgtgaaggaagcagttcctctggaagcttcttgaagacaaacaacgtctgtagcgaccctttgcaggcagcggaaccccccacctggcgacaggtgcctctgcggccaaaagccacgtgtataagatacacctgcaaaggcggcacaaccccagtgccacgttgtgagttggatagttgtggaaagagtcaaatggctctcctcaagcgtattcaacaaggggctgaaggatgcccagaaggtaccccattgtatgggatctgatctggggcctcggtgcacatgctttacatgtgtttagtcgaggttaaaaaacgtctaggccccccgaaccacggggacgtggttttcctttgaaaaacacgataataccatggttcgaccattgaactgcatcgtcgccgtgtcccaaaatatggggattggcaagaacggagacctaccctggcctccgctcaggaacgagttcaagtacttccaaagaatgaccacaacctcttcagtggaaggtaaacagaatctggtgattatgggtaggaaaacctggttctccattcctgagaagaatcgacctttaaaggacagaattaatatagttctcagtagagaactcaaagaaccaccacgaggagctcattttcttgccaaaagtttggatgatgccttaagacttattgaacaaccggaattggcaagtaaagtagacatggtttggatagtcggaggcagttctgtttaccaggaagccatgaatcaaccaggccacctcagactctttgtgacaaggatcatgcaggaatttgaaagtgacacgtttttcccagaaattgatttggggaaatataaacttctcccagaatacccaggcgtcctctctgaggtccaggaggaaaaaggcatcaagtataagtttgaagtctacgagaagaaagacggaggaggatccatgattgaacaagatggattgcacgcaggttctccggccgcttgggtggagaggctattcggctatgactgggcacaacagacaatcggctgctctgatgccgccgtgttccggctgtcagcgcaggggcgcccggttctttttgtcaagaccgacctgtccggtgccctgaatgaactgcaggacgaggcagcgcggctatcgtggctggccacgacgggcgttccttgcgcagctgtgctcgacgttgtcactgaagcgggaagggactggctgctattgggcgaagtgccggggcaggatctcctgtcatctcaccttgctcctgccgagaaagtatccatcatggctgatgcaatgcggcggctgcatacgcttgatccggctacctgcccattcgaccaccaagcgaaacatcgcatcgagcgagcacgtactcggatggaagccggtcttgtcgatcaggatgatctggacgaagagcatcaggggctcgcgccagccgaactgttcgccaggctcaaggcgcgcatgcccgacggcgaggatctcgtcgtgacccatggcgatgcctgcttgccgaatatcatggtggaaaatggccgcttttctggattcatcgactgtggccggctgggtgtggcggaccgctatcaggacatagcgttggctacccgtgatattgctgaagagcttggcggcgaatgggctgaccgcttcctcgtgctttacggtatcgccgctcccgattcgcagcgcatcgccttctatcgccttcttgacgagttcttctgaggatccactacgcgttagagctcgctgatcagcctcgactgtgccttctagttgccagccatctgttgtttgcccctcccccgtgccttccttgaccctggaaggtgccactcccactgtcctttcctaataaaatgaggaaattgcatcgcattgtctgagtaggtgtcattctattctggggggtggggtggggcaggacagcaagggggaggattgggaagacaatagcaggcatgctggggagctcttccgcttcctcgctcactgactcgctgcgctcggtcgttcggctgcggcgagcggtatcagctcactcaaaggcggtaatacggttatccacagaatcaggggataacgcaggaaagaacatgtgagcaaaaggccagcaaaaggccaggaaccgtaaaaaggccgcgttgctggcgtttttccataggctccgcccccctgacgagcatcacaaaaatcgacgctcaagtcagaggtggcgaaacccgacaggactataaagataccaggcgtttccccctggaagctccctcgtgcgctctcctgttccgaccctgccgcttaccggatacctgtccgcctttctcccttcgggaagcgtggcgctttctcaatgctcacgctgtaggtatctcagttcggtgtaggtcgttcgctccaagctgggctgtgtgcacgaaccccccgttcagcccgaccgctgcgccttatccggtaactatcgtcttgagtccaacccggtaagacacgacttatcgccactggcagcagccactggtaacaggattagcagagcgaggtatgtaggcggtgctacagagttcttgaagtggtggcctaactacggctacactagaaggacagtatttggtatctgcgctctgctgaagccagttaccttcggaaaaagagttggtagctcttgatccggcaaacaaaccaccgctggtagcggtggtttttttgtttgcaagcagcagattacgcgcagaaaaaaaggatctcaagaagatcctttgatcttttctacggggtctgacgctcagtggaacgaaaactcacgttaagggattttggtcatgagattatcaaaaaggatcttcacctagatccttttaaattaaaaatgaagttttaaatcaatctaaagtatatatgagtaaacttggtctgacagttaccaatgcttaatcagtgaggcacctatctcagcgatctgtctatttcgttcatccatagttgcctgactccccgtcgtgtagataactacgatacgggagggcttaccatctggccccagtgctgcaatgataccgcgagacccacgctcaccggctccagatttatcagcaataaaccagccagccggaagggccgagcgcagaagtggtcctgcaactttatccgcctccatccagtctattaattgttgccgggaagctagagtaagtagttcgccagttaatagtttgcgcaacgttgttgccattgctacaggcatcgtggtgtcacgctcgtcgtttggtatggcttcattcagctccggttcccaacgatcaaggcgagttacatgatcccccatgttgtgcaaaaaagcggttagctccttcggtcctccgatcgttgtcagaagtaagttggccgcagtgttatcactcatggttatggcagcactgcataattctcttactgtcatgccatccgtaagatgcttttctgtgactggtgagtactcaaccaagtcattctgagaatagtgtatgcggcgaccgagttgctcttgcccggcgtcaatacgggataataccgcgccacatagcagaactttaaaagtgctcatcattggaaaacgttcttcggggcgaaaactctcaaggatcttaccgctgttgagatccagttcgatgtaacccactcgtgcacccaactgatcttcagcatcttttactttcaccagcgtttctgggtgagcaaaaacaggaaggcaaaatgccgcaaaaaagggaataagggcgacacggaaatgttgaatactcatactcttcctttttcaatattattgaagcatttatcagggttattgtctcatgagcggatacatatttgaatgtatttagaaaaataaacaaataggggttccgcgcacatttccccgaaaagtgccacctgacgtctaagaaaccattattatcatgacattaacctataaaaataggcgtatcacgaggccctttcgtc

SEQ ID NO: 6581 - DNA, 9874 bp, Expression plasmid
tcgcgcgtttcggtgatgacggtgaaaacctctgacacatgcagctcccggagacggtcacagcttgtctgtaagcggatgccgggagcagacaagcccgtcagggcgcgtcagcgggtgttggcgggtgtcggggctggcttaactatgcggcatcagagcagattgtactgagagtgcaccatatgaagctttttgcaaaagcctaggcctccaaaaaagcctcctcactacttctggaatagctcagaggccgaggcggcctcggcctctgcataaataaaaaaaattagtcagccatggggcggagaatgggcggaactgggcggggagggaattattggctattggccattgcatacgttgtatctatatcataatatgtacatttatattggctcatgtccaatatgaccgccatgttgacattgattattgactagttattaatagtaatcaattacggggtcattagttcatagcccatatatggagttccgcgttacataacttacggtaaatggcccgcctggctgaccgcccaacgacccccgcccattgacgtcaataatgacgtatgttcccatagtaacgccaatagggactttccattgacgtcaatgggtggagtatttacggtaaactgcccacttggcagtacatcaagtgtatcatatgccaagtccgccccctattgacgtcaatgacggtaaatggcccgcctggcattatgcccagtacatgaccttacgggactttcctacttggcagtacatctacgtattagtcatcgctattaccatggtgatgcggttttggcagtacaccaatgggcgtggatagcggtttgactcacggggatttccaagtctccaccccattgacgtcaatgggagtttgttttggcaccaaaatcaacgggactttccaaaatgtcgtaataaccccgccccgttgacgcaaatgggcggtaggcgtgtacggtgggaggtctatataagcagagctcgtttagtgaaccgtcagatcgcctggagacgccatccacgctgttttgacctccatagaagacaccgggaccgatccagcctccgcggccgggaacggtgcattggaacgcggattccccgtgccaagagtgacgtaagtaccgcctatagactctataggcacacccctttggctcttatgcatgctatactgtttttggcttggggcctatacacccccgctccttatgctataggtgatggtatagcttagcctataggtgtgggttattgaccattattgaccactcccctattggtgacgatactttccattactaatccataacatggctctttgccacaactatctctattggctatatgccaatactctgtccttcagagactgacacggactctgtatttttacaggatggggtccatttattatttacaaattcacatatacaacaacgccgtcccccgtgcccgcagtttttattaaacatagcgtgggatctccgacatctcgggtacgtgttccggacatgggctcttctccggtagcggcggagcttccacatccgagccctggtcccatccgtccagcggctcatggtcgctcggcagctccttgctcctaacagtggaggccagacttaggcacagcacaatgcccaccaccaccagtgtgccgcacaaggccgtggcggtagggtatgtgtctgaaaatgagctcggagattgggctcgcacctggacgcagatggaagacttaaggcagcggcagaagaagatgcaggcagctgagttgttgtattctgataagagtcagaggtaactcccgttgcggtgctgttaacggtggagggcagtgtagtctgagcagtactcgttgctgccgcgcgcgccaccagacataatagctgacagactaacagactgttcctttccatgggtcttttctgcagtcaccgtcgtcgaccggtcgcgaattcgtacgatatcggcgcgcctcgaggtcgaaggcgcgccgccaccatgttcatcttcctgctgttcctgactctcactagtggtagtgaccttgaccggtgcaccacttttgatgatgttcaagctcctaattacactcaacatacttcatctatgaggggggtttactatcctgatgaaatttttagatcagacactctttatttaactcaggatttatttcttccattttattctaatgttacagggtttcatactattaatcatacgtttggcaaccctgtcataccttttaaggatggtatttattttgctgccacagagaaatcaaatgttgtccgtggttgggtttttggttctaccatgaacaacaagtcacagtcggtgattattattaacaattctactaatgttgttatacgagcatgtaactttgaattgtgtgacaaccctttctttgctgtttctaaacccatgggtacacagacacatactatgatattcgataatgcatttaattgcactttcgagtacatatctgatgccttttcgcttgatgtttcagaaaagtcaggtaattttaaacacttacgagagtttgtgtttaaaaataaagatgggtttctctatgtttataagggctatcaacctatagatgtagttcgtgatctaccttctggttttaacactttgaaacctatttttaagttgcctcttggtattaacattacaaattttagagccattcttacagccttttcacctgctcaagacatttggggcacgtcagctgcagcctattttgttggctatttaaagccaactacatttatgctcaagtatgatgaaaatggtacaatcacagatgctgttgattgttctcaaaatccacttgctgaactcaaatgctctgttaagagctttgagattgacaaaggaatttaccagacctctaatttcagggttgttccctcaggagatgttgtgagattccctaatattacaaacttgtgtccttttggagaggtttttaatgctactaaattcccttctgtctatgcatgggagagaaaaaaaatttctaattgtgttgctgattactctgtgctctacaactcaacatttttttcaacctttaagtgctatggcgtttctgccactaagttgaatgatctttgcttctccaatgtctatgcagattcttttgtagtcaagggagatgatgtaagacaaatagcgccaggacaaactggtgttattgctgattataattataaattgccagatgatttcatgggttgtgtccttgcttggaatactaggaacattgatgctacttcaactggtaattataattataaatataggtatcttagacatggcaagcttaggccctttgagagagacatatctaatgtgcctttctcccctgatggcaaaccttgcaccccacctgctcttaattgttattggccattaaatgattatggtttttacaccaccactggcattggctaccaaccttacagagttgtagtactttcttttgaacttttaaatgcaccggccacggtttgtggaccaaaattatccactgaccttattaagaaccagtgtgtcaattttaattttaatggactcactggtactggtgtgttaactccttcttcaaagagatttcaaccatttcaacaatttggccgtgatgtttctgatttcactgattccgttcgagatcctaaaacatctgaaatattagacatttcaccttgctcttttgggggtgtaagtgtaattacacctggaacaaatgcttcatctgaagttgctgttctatatcaagatgttaactgcactgatgtttctacagcaattcatgcagatcaactcacaccagcttggcgcatatattctactggaaacaatgtattccagactcaagcaggctgtcttataggagctgagcatgtcgacacttcttatgagtgcgacattcctattggagctggcatttgtgctagttaccatacagtttctttattacgtagtactagccaaaaatctattgtggcttatactatgtctttaggtgctgatagttcaattgcttactctaataacaccattgctatacctactaacttttcaattagcattactacagaagtaatgcctgtttctatggctaaaacctccgtagattgtaatatgtacatctgcggagattctactgaatgtgctaatttgcttctccaatatggtagcttttgcacacaactaaatcgtgcactctcaggtattgctgctgaacaggatcgcaacacacgtgaagtgttcgctcaagtcaaacaaatgtacaaaaccccaactttgaaatattttggtggttttaatttttcacaaatattacctgaccctctaaagccaactaagaggtcttttattgaggacttgctctttaataaggtgacactcgctgatgctggcttcatgaagcaatatggcgaatgcctaggtgatattaatgctagagatctcatttgtgcgcagaagttcaatggacttacagtgttgccacctctgctcactgatgatatgattgctgcctacactgctgctctagttagtggtactgccactgctggatggacatttggtgctggcgctgctcttcaaataccttttgctatgcaaatggcatataggttcaatggcattggagttacccaaaatgttctctatgagaaccaaaaacaaatcgccaaccaatttaacaaggcgattagtcaaattcaagaatcacttacaacaacatcaactgcattgggcaagctgcaagacgttgttaaccagaatgctcaagcattaaacacacttgttaaacaacttagctctaattttggtgcaatttcaagtgtgctaaatgatatcctttcgcgacttgataaagtcgaggcggaggtacaaattgacaggttaattacaggcagacttcaaagccttcaaacctatgtaacacaacaactaatcagggctgctgaaatcagggcttctgctaatcttgctgctactaaaatgtctgagtgtgttcttggacaatcaaaaagagttgacttttgtggaaagggctaccaccttatgtccttcccacaagcagccccgcatggtgttgtcttcctacatgtcacgtatgtgccatcccaggagaggaacttcaccacagcgccagcaatttgtcatgaaggcaaagcatacttccctcgtgaaggtgtttttgtgtttaatggcacttcttggtttattacacagaggaacttcttttctccacaaataattactacagacaatacatttgtctcaggaaattgtgatgtcgttattggcatcattaacaacacagtttatgatcctctgcaacctgagcttgactcattcaaagaagagctggacaagtacttcaaaaatcatacatcaccagatgttgattttggcgacatttcaggcattaacgcttctgtcgtcaacattcaaaaagaaattgaccgcctcaatgaggtcgctaaaaatttaaatgaatcactcattgaccttcaagaattgggaaaatatgagcaatatattaaatggccttaagcggccgcatcgatagatctcccgggtctagagggagaccacaacggtttccctctagcgggatcaattccgcccccccccctaacgttactggccgaagccgcttggaataaggccggtgtgcgtttgtctatatgttattttccaccatattgccgtcttttggcaatgtgagggcccggaaacctggccctgtcttcttgacgagcattcctaggggtctttcccctctcgccaaaggaatgcaaggtctgttgaatgtcgtgaaggaagcagttcctctggaagcttcttgaagacaaacaacgtctgtagcgaccctttgcaggcagcggaaccccccacctggcgacaggtgcctctgcggccaaaagccacgtgtataagatacacctgcaaaggcggcacaaccccagtgccacgttgtgagttggatagttgtggaaagagtcaaatggctctcctcaagcgtattcaacaaggggctgaaggatgcccagaaggtaccccattgtatgggatctgatctggggcctcggtgcacatgctttacatgtgtttagtcgaggttaaaaaacgtctaggccccccgaaccacggggacgtggttttcctttgaaaaacacgataataccatggttcgaccattgaactgcatcgtcgccgtgtcccaaaatatggggattggcaagaacggagacctaccctggcctccgctcaggaacgagttcaagtacttccaaagaatgaccacaacctcttcagtggaaggtaaacagaatctggtgattatgggtaggaaaacctggttctccattcctgagaagaatcgacctttaaaggacagaattaatatagttctcagtagagaactcaaagaaccaccacgaggagctcattttcttgccaaaagtttggatgatgccttaagacttattgaacaaccggaattggcaagtaaagtagacatggtttggatagtcggaggcagttctgtttaccaggaagccatgaatcaaccaggccacctcagactctttgtgacaaggatcatgcaggaatttgaaagtgacacgtttttcccagaaattgatttggggaaatataaacttctcccagaatacccaggcgtcctctctgaggtccaggaggaaaaaggcatcaagtataagtttgaagtctacgagaagaaagacggaggaggatccatgattgaacaagatggattgcacgcaggttctccggccgcttgggtggagaggctattcggctatgactgggcacaacagacaatcggctgctctgatgccgccgtgttccggctgtcagcgcaggggcgcccggttctttttgtcaagaccgacctgtccggtgccctgaatgaactgcaggacgaggcagcgcggctatcgtggctggccacgacgggcgttccttgcgcagctgtgctcgacgttgtcactgaagcgggaagggactggctgctattgggcgaagtgccggggcaggatctcctgtcatctcaccttgctcctgccgagaaagtatccatcatggctgatgcaatgcggcggctgcatacgcttgatccggctacctgcccattcgaccaccaagcgaaacatcgcatcgagcgagcacgtactcggatggaagccggtcttgtcgatcaggatgatctggacgaagagcatcaggggctcgcgccagccgaactgttcgccaggctcaaggcgcgcatgcccgacggcgaggatctcgtcgtgacccatggcgatgcctgcttgccgaatatcatggtggaaaatggccgcttttctggattcatcgactgtggccggctgggtgtggcggaccgctatcaggacatagcgttggctacccgtgatattgctgaagagcttggcggcgaatgggctgaccgcttcctcgtgctttacggtatcgccgctcccgattcgcagcgcatcgccttctatcgccttcttgacgagttcttctgaggatccactacgcgttagagctcgctgatcagcctcgactgtgccttctagttgccagccatctgttgtttgcccctcccccgtgccttccttgaccctggaaggtgccactcccactgtcctttcctaataaaatgaggaaattgcatcgcattgtctgagtaggtgtcattctattctggggggtggggtggggcaggacagcaagggggaggattgggaagacaatagcaggcatgctggggagctcttccgcttcctcgctcactgactcgctgcgctcggtcgttcggctgcggcgagcggtatcagctcactcaaaggcggtaatacggttatccacagaatcaggggataacgcaggaaagaacatgtgagcaaaaggccagcaaaaggccaggaaccgtaaaaaggccgcgttgctggcgtttttccataggctccgcccccctgacgagcatcacaaaaatcgacgctcaagtcagaggtggcgaaacccgacaggactataaagataccaggcgtttccccctggaagctccctcgtgcgctctcctgttccgaccctgccgcttaccggatacctgtccgcctttctcccttcgggaagcgtggcgctttctcaatgctcacgctgtaggtatctcagttcggtgtaggtcgttcgctccaagctgggctgtgtgcacgaaccccccgttcagcccgaccgctgcgccttatccggtaactatcgtcttgagtccaacccggtaagacacgacttatcgccactggcagcagccactggtaacaggattagcagagcgaggtatgtaggcggtgctacagagttcttgaagtggtggcctaactacggctacactagaaggacagtatttggtatctgcgctctgctgaagccagttaccttcggaaaaagagttggtagctcttgatccggcaaacaaaccaccgctggtagcggtggtttttttgtttgcaagcagcagattacgcgcagaaaaaaaggatctcaagaagatcctttgatcttttctacggggtctgacgctcagtggaacgaaaactcacgttaagggattttggtcatgagattatcaaaaaggatcttcacctagatccttttaaattaaaaatgaagttttaaatcaatctaaagtatatatgagtaaacttggtctgacagttaccaatgcttaatcagtgaggcacctatctcagcgatctgtctatttcgttcatccatagttgcctgactccccgtcgtgtagataactacgatacgggagggcttaccatctggccccagtgctgcaatgataccgcgagacccacgctcaccggctccagatttatcagcaataaaccagccagccggaagggccgagcgcagaagtggtcctgcaactttatccgcctccatccagtctattaattgttgccgggaagctagagtaagtagttcgccagttaatagtttgcgcaacgttgttgccattgctacaggcatcgtggtgtcacgctcgtcgtttggtatggcttcattcagctccggttcccaacgatcaaggcgagttacatgatcccccatgttgtgcaaaaaagcggttagctccttcggtcctccgatcgttgtcagaagtaagttggccgcagtgttatcactcatggttatggcagcactgcataattctcttactgtcatgccatccgtaagatgcttttctgtgactggtgagtactcaaccaagtcattctgagaatagtgtatgcggcgaccgagttgctcttgcccggcgtcaatacgggataataccgcgccacatagcagaactttaaaagtgctcatcattggaaaacgttcttcggggcgaaaactctcaaggatcttaccgctgttgagatccagttcgatgtaacccactcgtgcacccaactgatcttcagcatcttttactttcaccagcgtttctgggtgagcaaaaacaggaaggcaaaatgccgcaaaaaagggaataagggcgacacggaaatgttgaatactcatactcttcctttttcaatattattgaagcatttatcagggttattgtctcatgagcggatacatatttgaatgtatttagaaaaataaacaaataggggttccgcgcacatttccccgaaaagtgccacctgacgtctaagaaaccattattatcatgacattaacctataaaaataggcgtatcacgaggccctttcgtc

SEQ ID NO: 6582 - DNA, 8293 bp, Expression plasmid
tcgcgcgtttcggtgatgacggtgaaaacctctgacacatgcagctcccggagacggtcacagcttgtctgtaagcggatgccgggagcagacaagcccgtcagggcgcgtcagcgggtgttggcgggtgtcggggctggcttaactatgcggcatcagagcagattgtactgagagtgcaccatatgaagctttttgcaaaagcctaggcctccaaaaaagcctcctcactacttctggaatagctcagaggccgaggcggcctcggcctctgcataaataaaaaaaattagtcagccatggggcggagaatgggcggaactgggcggggagggaattattggctattggccattgcatacgttgtatctatatcataatatgtacatttatattggctcatgtccaatatgaccgccatgttgacattgattattgactagttattaatagtaatcaattacggggtcattagttcatagcccatatatggagttccgcgttacataacttacggtaaatggcccgcctggctgaccgcccaacgacccccgcccattgacgtcaataatgacgtatgttcccatagtaacgccaatagggactttccattgacgtcaatgggtggagtatttacggtaaactgcccacttggcagtacatcaagtgtatcatatgccaagtccgccccctattgacgtcaatgacggtaaatggcccgcctggcattatgcccagtacatgaccttacgggactttcctacttggcagtacatctacgtattagtcatcgctattaccatggtgatgcggttttggcagtacaccaatgggcgtggatagcggtttgactcacggggatttccaagtctccaccccattgacgtcaatgggagtttgttttggcaccaaaatcaacgggactttccaaaatgtcgtaataaccccgccccgttgacgcaaatgggcggtaggcgtgtacggtgggaggtctatataagcagagctcgtttagtgaaccgtcagatcgcctggagacgccatccacgctgttttgacctccatagaagacaccgggaccgatccagcctccgcggccgggaacggtgcattggaacgcggattccccgtgccaagagtgacgtaagtaccgcctatagactctataggcacacccctttggctcttatgcatgctatactgtttttggcttggggcctatacacccccgctccttatgctataggtgatggtatagcttagcctataggtgtgggttattgaccattattgaccactcccctattggtgacgatactttccattactaatccataacatggctctttgccacaactatctctattggctatatgccaatactctgtccttcagagactgacacggactctgtatttttacaggatggggtccatttattatttacaaattcacatatacaacaacgccgtcccccgtgcccgcagtttttattaaacatagcgtgggatctccgacatctcgggtacgtgttccggacatgggctcttctccggtagcggcggagcttccacatccgagccctggtcccatccgtccagcggctcatggtcgctcggcagctccttgctcctaacagtggaggccagacttaggcacagcacaatgcccaccaccaccagtgtgccgcacaaggccgtggcggtagggtatgtgtctgaaaatgagctcggagattgggctcgcacctggacgcagatggaagacttaaggcagcggcagaagaagatgcaggcagctgagttgttgtattctgataagagtcagaggtaactcccgttgcggtgctgttaacggtggagggcagtgtagtctgagcagtactcgttgctgccgcgcgcgccaccagacataatagctgacagactaacagactgttcctttccatgggtcttttctgcagtcaccgtcgtcgaccggtcgcgaattcgtacgatatcggcgcgcctcgaggtcgaaggcgcgccgccaccatgttcatcttcctgctgttcctgactctcactagtggtagtgaccttgaccggtgcaccacttttgatgatgttcaagctcctaattacactcaacatacttcatctatgaggggggtttactatcctgatgaaatttttagatcagacactctttatttaactcaggatttatttcttccattttattctaatgttacagggtttcatactattaatcatacgtttggcaaccctgtcataccttttaaggatggtatttattttgctgccacagagaaatcaaatgttgtccgtggttgggtttttggttctaccatgaacaacaagtcacagtcggtgattattattaacaattctactaatgttgttatacgagcatgtaactttgaattgtgtgacaaccctttctttgctgtttctaaacccatgggtacacagacacatactatgatattcgataatgcatttaattgcactttcgagtacatatctgatgccttttcgcttgatgtttcagaaaagtcaggtaattttaaacacttacgagagtttgtgtttaaaaataaagatgggtttctctatgtttataagggctatcaacctatagatgtagttcgtgatctaccttctggttttaacactttgaaacctatttttaagttgcctcttggtattaacattacaaattttagagccattcttacagccttttcacctgctcaagacatttggggcacgtcagctgcagcctattttgttggctatttaaagccaactacatttatgctcaagtatgatgaaaatggtacaatcacagatgctgttgattgttctcaaaatccacttgctgaactcaaatgctctgttaagagctttgagattgacaaaggaatttaccagacctctaatttcagggttgttccctcaggagatgttgtgagattccctaatattacaaacttgtgtccttttggagaggtttttaatgctactaaattcccttctgtctatgcatgggagagaaaaaaaatttctaattgtgttgctgattactctgtgctctacaactcaacatttttttcaacctttaagtgctatggcgtttctgccactaagttgaatgatctttgcttctccaatgtctatgcagattcttttgtagtcaagggagatgatgtaagacaaatagcgccagggcaaactggtgttattgctgattataattataaattgccagatgatttcatgggttgtgtccttgcttggaatactaggaacattgatgctacttcaactggtaattataattataaatataggtatcttagacatggcaagcttaggccctttgagagagacatatctaatgtgcctttctcccctgatggcaaaccttgcaccccacctgctcttaattgttattggccattaaatgattatggtttttacaccactactggcattggctaccaaccttacagagttgtagtactttcttttgaacttttaaatgcaccggccacggtttgtggaccaaaattatccactgaccttattaagaaccagtgtgtcaattttaattttaatggactcactggtactggtgtgttaactccttcttcaaagagatttcaaccatttcaacaatttggccgtgatgtttctgatttcactgattccgttcgagatcctaaaacatctgaaatattagacatttcaccttgctcttttgggggtgtaagtgtaattacacctggaacaaatgcttcatctgaagttgctgttctatatcaagatgttaactgcactgatgtttctacagcaattcatgcagatcaactcacaccagcttggcgcatatattctactggaaacaatgtattccagactcaagcaggctgtcttataggagctgagcatgtcgacacttcttatgagtgcgacattcctattggagctggcatttgtgctagttaccatacacaccaccaccaccaccactaagcggccgcatcgatagatctcccgggtctagagggagaccacaacggtttccctctagcgggatcaattccgcccccccccctaacgttactggccgaagccgcttggaataaggccggtgtgcgtttgtctatatgttattttccaccatattgccgtcttttggcaatgtgagggcccggaaacctggccctgtcttcttgacgagcattcctaggggtctttcccctctcgccaaaggaatgcaaggtctgttgaatgtcgtgaaggaagcagttcctctggaagcttcttgaagacaaacaacgtctgtagcgaccctttgcaggcagcggaaccccccacctggcgacaggtgcctctgcggccaaaagccacgtgtataagatacacctgcaaaggcggcacaaccccagtgccacgttgtgagttggatagttgtggaaagagtcaaatggctctcctcaagcgtattcaacaaggggctgaaggatgcccagaaggtaccccattgtatgggatctgatctggggcctcggtgcacatgctttacatgtgtttagtcgaggttaaaaaacgtctaggccccccgaaccacggggacgtggttttcctttgaaaaacacgataataccatggttcgaccattgaactgcatcgtcgccgtgtcccaaaatatggggattggcaagaacggagacctaccctggcctccgctcaggaacgagttcaagtacttccaaagaatgaccacaacctcttcagtggaaggtaaacagaatctggtgattatgggtaggaaaacctggttctccattcctgagaagaatcgacctttaaaggacagaattaatatagttctcagtagagaactcaaagaaccaccacgaggagctcattttcttgccaaaagtttggatgatgccttaagacttattgaacaaccggaattggcaagtaaagtagacatggtttggatagtcggaggcagttctgtttaccaggaagccatgaatcaaccaggccacctcagactctttgtgacaaggatcatgcaggaatttgaaagtgacacgtttttcccagaaattgatttggggaaatataaacttctcccagaatacccaggcgtcctctctgaggtccaggaggaaaaaggcatcaagtataagtttgaagtctacgagaagaaagacggaggaggatccatgattgaacaagatggattgcacgcaggttctccggccgcttgggtggagaggctattcggctatgactgggcacaacagacaatcggctgctctgatgccgccgtgttccggctgtcagcgcaggggcgcccggttctttttgtcaagaccgacctgtccggtgccctgaatgaactgcaggacgaggcagcgcggctatcgtggctggccacgacgggcgttccttgcgcagctgtgctcgacgttgtcactgaagcgggaagggactggctgctattgggcgaagtgccggggcaggatctcctgtcatctcaccttgctcctgccgagaaagtatccatcatggctgatgcaatgcggcggctgcatacgcttgatccggctacctgcccattcgaccaccaagcgaaacatcgcatcgagcgagcacgtactcggatggaagccggtcttgtcgatcaggatgatctggacgaagagcatcaggggctcgcgccagccgaactgttcgccaggctcaaggcgcgcatgcccgacggcgaggatctcgtcgtgacccatggcgatgcctgcttgccgaatatcatggtggaaaatggccgcttttctggattcatcgactgtggccggctgggtgtggcggaccgctatcaggacatagcgttggctacccgtgatattgctgaagagcttggcggcgaatgggctgaccgcttcctcgtgctttacggtatcgccgctcccgattcgcagcgcatcgccttctatcgccttcttgacgagttcttctgaggatccactacgcgttagagctcgctgatcagcctcgactgtgccttctagttgccagccatctgttgtttgcccctcccccgtgccttccttgaccctggaaggtgccactcccactgtcctttcctaataaaatgaggaaattgcatcgcattgtctgagtaggtgtcattctattctggggggtggggtggggcaggacagcaagggggaggattgggaagacaatagcaggcatgctggggagctcttccgcttcctcgctcactgactcgctgcgctcggtcgttcggctgcggcgagcggtatcagctcactcaaaggcggtaatacggttatccacagaatcaggggataacgcaggaaagaacatgtgagcaaaaggccagcaaaaggccaggaaccgtaaaaaggccgcgttgctggcgtttttccataggctccgcccccctgacgagcatcacaaaaatcgacgctcaagtcagaggtggcgaaacccgacaggactataaagataccaggcgtttccccctggaagctccctcgtgcgctctcctgttccgaccctgccgcttaccggatacctgtccgcctttctcccttcgggaagcgtggcgctttctcaatgctcacgctgtaggtatctcagttcggtgtaggtcgttcgctccaagctgggctgtgtgcacgaaccccccgttcagcccgaccgctgcgccttatccggtaactatcgtcttgagtccaacccggtaagacacgacttatcgccactggcagcagccactggtaacaggattagcagagcgaggtatgtaggcggtgctacagagttcttgaagtggtggcctaactacggctacactagaaggacagtatttggtatctgcgctctgctgaagccagttaccttcggaaaaagagttggtagctcttgatccggcaaacaaaccaccgctggtagcggtggtttttttgtttgcaagcagcagattacgcgcagaaaaaaaggatctcaagaagatcctttgatcttttctacggggtctgacgctcagtggaacgaaaactcacgttaagggattttggtcatgagattatcaaaaaggatcttcacctagatccttttaaattaaaaatgaagttttaaatcaatctaaagtatatatgagtaaacttggtctgacagttaccaatgcttaatcagtgaggcacctatctcagcgatctgtctatttcgttcatccatagttgcctgactccccgtcgtgtagataactacgatacgggagggcttaccatctggccccagtgctgcaatgataccgcgagacccacgctcaccggctccagatttatcagcaataaaccagccagccggaagggccgagcgcagaagtggtcctgcaactttatccgcctccatccagtctattaattgttgccgggaagctagagtaagtagttcgccagttaatagtttgcgcaacgttgttgccattgctacaggcatcgtggtgtcacgctcgtcgtttggtatggcttcattcagctccggttcccaacgatcaaggcgagttacatgatcccccatgttgtgcaaaaaagcggttagctccttcggtcctccgatcgttgtcagaagtaagttggccgcagtgttatcactcatggttatggcagcactgcataattctcttactgtcatgccatccgtaagatgcttttctgtgactggtgagtactcaaccaagtcattctgagaatagtgtatgcggcgaccgagttgctcttgcccggcgtcaatacgggataataccgcgccacatagcagaactttaaaagtgctcatcattggaaaacgttcttcggggcgaaaactctcaaggatcttaccgctgttgagatccagttcgatgtaacccactcgtgcacccaactgatcttcagcatcttttactttcaccagcgtttctgggtgagcaaaaacaggaaggcaaaatgccgcaaaaaagggaataagggcgacacggaaatgttgaatactcatactcttcctttttcaatattattgaagcatttatcagggttattgtctcatgagcggatacatatttgaatgtatttagaaaaataaacaaataggggttccgcgcacatttccccgaaaagtgccacctgacgtctaagaaaccattattatcatgacattaacctataaaaataggcgtatcacgaggccctttcgtc

SEQ ID NO: 6583 - DNA, 8275 bp, Expression plasmid
tcgcgcgtttcggtgatgacggtgaaaacctctgacacatgcagctcccggagacggtcacagcttgtctgtaagcggatgccgggagcagacaagcccgtcagggcgcgtcagcgggtgttggcgggtgtcggggctggcttaactatgcggcatcagagcagattgtactgagagtgcaccatatgaagctttttgcaaaagcctaggcctccaaaaaagcctcctcactacttctggaatagctcagaggccgaggcggcctcggcctctgcataaataaaaaaaattagtcagccatggggcggagaatgggcggaactgggcggggagggaattattggctattggccattgcatacgttgtatctatatcataatatgtacatttatattggctcatgtccaatatgaccgccatgttgacattgattattgactagttattaatagtaatcaattacggggtcattagttcatagcccatatatggagttccgcgttacataacttacggtaaatggcccgcctggctgaccgcccaacgacccccgcccattgacgtcaataatgacgtatgttcccatagtaacgccaatagggactttccattgacgtcaatgggtggagtatttacggtaaactgcccacttggcagtacatcaagtgtatcatatgccaagtccgccccctattgacgtcaatgacggtaaatggcccgcctggcattatgcccagtacatgaccttacgggactttcctacttggcagtacatctacgtattagtcatcgctattaccatggtgatgcggttttggcagtacaccaatgggcgtggatagcggtttgactcacggggatttccaagtctccaccccattgacgtcaatgggagtttgttttggcaccaaaatcaacgggactttccaaaatgtcgtaataaccccgccccgttgacgcaaatgggcggtaggcgtgtacggtgggaggtctatataagcagagctcgtttagtgaaccgtcagatcgcctggagacgccatccacgctgttttgacctccatagaagacaccgggaccgatccagcctccgcggccgggaacggtgcattggaacgcggattccccgtgccaagagtgacgtaagtaccgcctatagactctataggcacacccctttggctcttatgcatgctatactgtttttggcttggggcctatacacccccgctccttatgctataggtgatggtatagcttagcctataggtgtgggttattgaccattattgaccactcccctattggtgacgatactttccattactaatccataacatggctctttgccacaactatctctattggctatatgccaatactctgtccttcagagactgacacggactctgtatttttacaggatggggtccatttattatttacaaattcacatatacaacaacgccgtcccccgtgcccgcagtttttattaaacatagcgtgggatctccgacatctcgggtacgtgttccggacatgggctcttctccggtagcggcggagcttccacatccgagccctggtcccatccgtccagcggctcatggtcgctcggcagctccttgctcctaacagtggaggccagacttaggcacagcacaatgcccaccaccaccagtgtgccgcacaaggccgtggcggtagggtatgtgtctgaaaatgagctcggagattgggctcgcacctggacgcagatggaagacttaaggcagcggcagaagaagatgcaggcagctgagttgttgtattctgataagagtcagaggtaactcccgttgcggtgctgttaacggtggagggcagtgtagtctgagcagtactcgttgctgccgcgcgcgccaccagacataatagctgacagactaacagactgttcctttccatgggtcttttctgcagtcaccgtcgtcgaccggtcgcgaattcgtacgatatcggcgcgcctcgaggtcgaaggcgcgccgccaccatgttcatcttcctgctgttcctgactctcactagtggtagtgaccttgaccggtgcaccacttttgatgatgttcaagctcctaattacactcaacatacttcatctatgaggggggtttactatcctgatgaaatttttagatcagacactctttatttaactcaggatttatttcttccattttattctaatgttacagggtttcatactattaatcatacgtttggcaaccctgtcataccttttaaggatggtatttattttgctgccacagagaaatcaaatgttgtccgtggttgggtttttggttctaccatgaacaacaagtcacagtcggtgattattattaacaattctactaatgttgttatacgagcatgtaactttgaattgtgtgacaaccctttctttgctgtttctaaacccatgggtacacagacacatactatgatattcgataatgcatttaattgcactttcgagtacatatctgatgccttttcgcttgatgtttcagaaaagtcaggtaattttaaacacttacgagagtttgtgtttaaaaataaagatgggtttctctatgtttataagggctatcaacctatagatgtagttcgtgatctaccttctggttttaacactttgaaacctatttttaagttgcctcttggtattaacattacaaattttagagccattcttacagccttttcacctgctcaagacatttggggcacgtcagctgcagcctattttgttggctatttaaagccaactacatttatgctcaagtatgatgaaaatggtacaatcacagatgctgttgattgttctcaaaatccacttgctgaactcaaatgctctgttaagagctttgagattgacaaaggaatttaccagacctctaatttcagggttgttccctcaggagatgttgtgagattccctaatattacaaacttgtgtccttttggagaggtttttaatgctactaaattcccttctgtctatgcatgggagagaaaaaaaatttctaattgtgttgctgattactctgtgctctacaactcaacatttttttcaacctttaagtgctatggcgtttctgccactaagttgaatgatctttgcttctccaatgtctatgcagattcttttgtagtcaagggagatgatgtaagacaaatagcgccagggcaaactggtgttattgctgattataattataaattgccagatgatttcatgggttgtgtccttgcttggaatactaggaacattgatgctacttcaactggtaattataattataaatataggtatcttagacatggcaagcttaggccctttgagagagacatatctaatgtgcctttctcccctgatggcaaaccttgcaccccacctgctcttaattgttattggccattaaatgattatggtttttacaccactactggcattggctaccaaccttacagagttgtagtactttcttttgaacttttaaatgcaccggccacggtttgtggaccaaaattatccactgaccttattaagaaccagtgtgtcaattttaattttaatggactcactggtactggtgtgttaactccttcttcaaagagatttcaaccatttcaacaatttggccgtgatgtttctgatttcactgattccgttcgagatcctaaaacatctgaaatattagacatttcaccttgctcttttgggggtgtaagtgtaattacacctggaacaaatgcttcatctgaagttgctgttctatatcaagatgttaactgcactgatgtttctacagcaattcatgcagatcaactcacaccagcttggcgcatatattctactggaaacaatgtattccagactcaagcaggctgtcttataggagctgagcatgtcgacacttcttatgagtgcgacattcctattggagctggcatttgtgctagttaccatacataagcggccgcatcgatagatctcccgggtctagagggagaccacaacggtttccctctagcgggatcaattccgcccccccccctaacgttactggccgaagccgcttggaataaggccggtgtgcgtttgtctatatgttattttccaccatattgccgtcttttggcaatgtgagggcccggaaacctggccctgtcttcttgacgagcattcctaggggtctttcccctctcgccaaaggaatgcaaggtctgttgaatgtcgtgaaggaagcagttcctctggaagcttcttgaagacaaacaacgtctgtagcgaccctttgcaggcagcggaaccccccacctggcgacaggtgcctctgcggccaaaagccacgtgtataagatacacctgcaaaggcggcacaaccccagtgccacgttgtgagttggatagttgtggaaagagtcaaatggctctcctcaagcgtattcaacaaggggctgaaggatgcccagaaggtaccccattgtatgggatctgatctggggcctcggtgcacatgctttacatgtgtttagtcgaggttaaaaaacgtctaggccccccgaaccacggggacgtggttttcctttgaaaaacacgataataccatggttcgaccattgaactgcatcgtcgccgtgtcccaaaatatggggattggcaagaacggagacctaccctggcctccgctcaggaacgagttcaagtacttccaaagaatgaccacaacctcttcagtggaaggtaaacagaatctggtgattatgggtaggaaaacctggttctccattcctgagaagaatcgacctttaaaggacagaattaatatagttctcagtagagaactcaaagaaccaccacgaggagctcattttcttgccaaaagtttggatgatgccttaagacttattgaacaaccggaattggcaagtaaagtagacatggtttggatagtcggaggcagttctgtttaccaggaagccatgaatcaaccaggccacctcagactctttgtgacaaggatcatgcaggaatttgaaagtgacacgtttttcccagaaattgatttggggaaatataaacttctcccagaatacccaggcgtcctctctgaggtccaggaggaaaaaggcatcaagtataagtttgaagtctacgagaagaaagacggaggaggatccatgattgaacaagatggattgcacgcaggttctccggccgcttgggtggagaggctattcggctatgactgggcacaacagacaatcggctgctctgatgccgccgtgttccggctgtcagcgcaggggcgcccggttctttttgtcaagaccgacctgtccggtgccctgaatgaactgcaggacgaggcagcgcggctatcgtggctggccacgacgggcgttccttgcgcagctgtgctcgacgttgtcactgaagcgggaagggactggctgctattgggcgaagtgccggggcaggatctcctgtcatctcaccttgctcctgccgagaaagtatccatcatggctgatgcaatgcggcggctgcatacgcttgatccggctacctgcccattcgaccaccaagcgaaacatcgcatcgagcgagcacgtactcggatggaagccggtcttgtcgatcaggatgatctggacgaagagcatcaggggctcgcgccagccgaactgttcgccaggctcaaggcgcgcatgcccgacggcgaggatctcgtcgtgacccatggcgatgcctgcttgccgaatatcatggtggaaaatggccgcttttctggattcatcgactgtggccggctgggtgtggcggaccgctatcaggacatagcgttggctacccgtgatattgctgaagagcttggcggcgaatgggctgaccgcttcctcgtgctttacggtatcgccgctcccgattcgcagcgcatcgccttctatcgccttcttgacgagttcttctgaggatccactacgcgttagagctcgctgatcagcctcgactgtgccttctagttgccagccatctgttgtttgcccctcccccgtgccttccttgaccctggaaggtgccactcccactgtcctttcctaataaaatgaggaaattgcatcgcattgtctgagtaggtgtcattctattctggggggtggggtggggcaggacagcaagggggaggattgggaagacaatagcaggcatgctggggagctcttccgcttcctcgctcactgactcgctgcgctcggtcgttcggctgcggcgagcggtatcagctcactcaaaggcggtaatacggttatccacagaatcaggggataacgcaggaaagaacatgtgagcaaaaggccagcaaaaggccaggaaccgtaaaaaggccgcgttgctggcgtttttccataggctccgcccccctgacgagcatcacaaaaatcgacgctcaagtcagaggtggcgaaacccgacaggactataaagataccaggcgtttccccctggaagctccctcgtgcgctctcctgttccgaccctgccgcttaccggatacctgtccgcctttctcccttcgggaagcgtggcgctttctcaatgctcacgctgtaggtatctcagttcggtgtaggtcgttcgctccaagctgggctgtgtgcacgaaccccccgttcagcccgaccgctgcgccttatccggtaactatcgtcttgagtccaacccggtaagacacgacttatcgccactggcagcagccactggtaacaggattagcagagcgaggtatgtaggcggtgctacagagttcttgaagtggtggcctaactacggctacactagaaggacagtatttggtatctgcgctctgctgaagccagttaccttcggaaaaagagttggtagctcttgatccggcaaacaaaccaccgctggtagcggtggtttttttgtttgcaagcagcagattacgcgcagaaaaaaaggatctcaagaagatcctttgatcttttctacggggtctgacgctcagtggaacgaaaactcacgttaagggattttggtcatgagattatcaaaaaggatcttcacctagatccttttaaattaaaaatgaagttttaaatcaatctaaagtatatatgagtaaacttggtctgacagttaccaatgcttaatcagtgaggcacctatctcagcgatctgtctatttcgttcatccatagttgcctgactccccgtcgtgtagataactacgatacgggagggcttaccatctggccccagtgctgcaatgataccgcgagacccacgctcaccggctccagatttatcagcaataaaccagccagccggaagggccgagcgcagaagtggtcctgcaactttatccgcctccatccagtctattaattgttgccgggaagctagagtaagtagttcgccagttaatagtttgcgcaacgttgttgccattgctacaggcatcgtggtgtcacgctcgtcgtttggtatggcttcattcagctccggttcccaacgatcaaggcgagttacatgatcccccatgttgtgcaaaaaagcggttagctccttcggtcctccgatcgttgtcagaagtaagttggccgcagtgttatcactcatggttatggcagcactgcataattctcttactgtcatgccatccgtaagatgcttttctgtgactggtgagtactcaaccaagtcattctgagaatagtgtatgcggcgaccgagttgctcttgcccggcgtcaatacgggataataccgcgccacatagcagaactttaaaagtgctcatcattggaaaacgttcttcggggcgaaaactctcaaggatcttaccgctgttgagatccagttcgatgtaacccactcgtgcacccaactgatcttcagcatcttttactttcaccagcgtttctgggtgagcaaaaacaggaaggcaaaatgccgcaaaaaagggaataagggcgacacggaaatgttgaatactcatactcttcctttttcaatattattgaagcatttatcagggttattgtctcatgagcggatacatatttgaatgtatttagaaaaataaacaaataggggttccgcgcacatttccccgaaaagtgccacctgacgtctaagaaaccattattatcatgacattaacctataaaaataggcgtatcacgaggccctttcgtc

SEQ ID NO: 6584 - DNA, 17 bp, Artificial Sequence
  Primer
tacacacctcagcgttg

SEQ ID NO: 6585 - DNA, 16 bp, Artificial Sequence
  Primer
cacgaacgtgacgaat

SEQ ID NO: 6586 - DNA, 26 bp, Artificial Sequence
  Primer
  misc_feature 21...26: N is any nucleotide
gccggagctctgcagaattcnnnnnn

SEQ ID NO: 6587 - DNA, 20 bp, Artificial Sequence
  Primer
gccggagctctgcagaattc

SEQ ID NO: 6588 - protein, 16 aa, SARS coronavirus
LPRKSQPTSISCRSVL

SEQ ID NO: 6589 - protein, 14 aa, SARS coronavirus
TNFKICVAVARLHA

SEQ ID NO: 6590 - protein, 5 aa, SARS coronavirus
CTYAV

SEQ ID NO: 6591 - protein, 40 aa, SARS coronavirus
TIINFTVVDKKRVTRPSSADCLRFRPCCSRSSAYLGFVRV

SEQ ID NO: 6592 - protein, 4386 aa, SARS coronavirus
PKGKMESLVLGVNEKTHVQLSLPVLQVRDVLVRGFGDSVEEALSEAREHLKNGTCGLVELEKGVLPQLEQPYVFIKRSDALSTNHGHKVVELVAEMDGIQYGRSGITLGVLVPHVGETPIAYRNVLLRKNGNKGAGGHSYGIDLKSYDLGDELGTDPIEDYEQNWNTKHGSGALRELTRELNGGAVTRYVDNNFCGPDGYPLDCIKDFLARAGKSMCTLSEQLDYIESKRGVYCCRDHEHEIAWFTERSDKSYEHQTPFEIKSAKKFDTFKGECPKFVFPLNSKVKVIQPRVEKKKTEGFMGRIRSVYPVASPQECNNMHLSTLMKCNHCDEVSWQTCDFLKATCEHCGTENLVIEGPTTCGYLPTNAVVKMPCPACQDPEIGPEHSVADYHNHSNIETRLRKGGRTRCFGGCVFAYVGCYNKRAYWVPRASADIGSGHTGITGDNVETLNEDLLEILSRERVNINIVGDFHLNEEVAIILASFSASTSAFIDTIKSLDYKSFKTIVESCGNYKVTKGKPVKGAWNIGQQRSVLTPLCGFPSQAAGVIRSIFARTLDAANHSIPDLQRAAVTILDGISEQSLRLVDAMVYTSDLLTNSVIIMAYVTGGLVQQTSQWLSNLLGTTVEKLRPIFEWIEAKLSAGVEFLKDAWEILKFLITGVFDIVKGQIQVASDNIKDCVKCFIDVVNKALEMCIDQVTIAGAKLRSLNLGEVFIAQSKGLYRQCIRGKEQLQLLMPLKAPKEVTFLEGDSHDTVLTSEEVVLKNGELEALETPVDSFTNGAIVGTPVCVNGLMLLEIKDKEQYCALSPGLLATNNVFRLKGGAPIKGVTFGEDTVWEVQGYKNVRITFELDERVDKVLNEKCSVYTVESGTEVTEFACVVAEAVVKTLQPVSDLLTNMGIDLDEWSVATFYLFDDAGEENFSSRMYCSFYPPDEEEEDDAECEEEEIDETCEHEYGTEDDYQGLPLEFGASAETVRVEEEEEEDWLDDTTEQSEIEPEPEPTPEEPVNQFTGYLKLTDNVAIKCVDIVKEAQSANPMVIVNAANIHLKHGGGVAGALNKATNGAMQKESDDYIKLNGPLTVGGSCLLSGHNLAKKCLHVVGPNLNAGEDIQLLKAAYENFNSQDILLAPLLSAGIFGAKPLQSLQVCVQTVRTQVYIAVNDKALYEQVVMDYLDNLKPRVEAPKQEEPPNTEDSKTEEKSVVQKPVDVKPKIKACIDEVTTTLEETKFLTNKLLLFADINGKLYHDSQNMLRGEDMSFLEKDAPYMVGDVITSGDITCVVIPSKKAGGTTEMLSRALKKVPVDEYITTYPGQGCAGYTLEEAKTALKKCKSAFYVLPSEAPNAKEEILGTVSWNLREMLAHAEETRKLMPICMDVRAIMATIQRKYKGIKIQEGIVDYGVRFFFYTSKEPVASIITKLNSLNEPLVTMPIGYVTHGFNLEEAARCMRSLKAPAVVSVSSPDAVTTYNGYLTSSSKTSEEHFVETVSLAGSYRDWSYSGQRTELGVEFLKRGDKIVYHTLESPVEFHLDGEVLSLDKLKSLLSLREVKTIKVFTTVDNTNLHTQLVDMSMTYGQQFGPTYLDGADVTKIKPHVNHEGKTFFVLPSDDTLRSEAFEYYHTLDESFLGRYMSALNHTKKWKFPQVGGLTSIKWADNNCYLSSVLLALQQLEVKFNAPALQEAYYRARAGDAANFCALILAYSNKTVGELGDVRETMTHLLQHANLESAKRVLNVVCKHCGQKTTTLTGVEAVMYMGTLSYDNLKTGVSIPCVCGRDATQYLVQQESSFVMMSAPPAEYKLQQGTFLCANEYTGNYQCGHYTHITAKETLYRIDGAHLTKMSEYKGPVTDVFYKETSYTTTIKPVSYKLDGVTYTEIEPKLDGYYKKDNAYYTEQPIDLVPTQPLPNASFDNFKLTCSNTKFADDLNQMTGFTKPASRELSVTFFPDLNGDVVAIDYRHYSASFKKGAKLLHKPIVWHINQATTKTTFKPNTWCLRCLWSTKPVDTSNSFEVLAVEDTQGMDNLACESQQPTSEEVVENPTIQKEVIECDVKTTEVVGNVILKPSDEGVKVTQELGHEDLMAAYVENTSITIKKPNELSLALGLKTIATHGIAAINSVPWSKILAYVKPFLGQAAITTSNCAKRLAQRVFNNYMPYVFTLLFQLCTFTKSTNSRIRASLPTTIAKNSVKSVAKLCLDAGINYVKSPKFSKLFTIAMWLLLLSICLGSLICVTAAFGVLLSNFGAPSYCNGVRELYLNSSNVTTMDFCEGSFPCSICLSGLDSLDSYPALETIQVTISSYKLDLTILGLAAEWVLAYMLFTKFFYLLGLSAIMQVFFGYFASHFISNSWLMWFIISIVQMAPVSAMVRMYIFFASFYYIWKSYVHIMDGCTSSTCMMCYKRNRATRVECTTIVNGMKRSFYVYANGGRGFCKTHNWNCLNCDTFCTGSTFISDEVARDLSLQFKRPINPTDQSSYIVDSVAVKNGALHLYFDKAGQKTYERHPLSHFVNLDNLRANNTKGSLPINVIVFDGKSKCDESASKSASVYYSQLMCQPILLLDQALVSDVGDSTEVSVKMFDAYVDTFSATFSVPMEKLKALVATAHSELAKGVALDGVLSTFVSAARQGVVDTDVDTKDVIECLKLSHHSDLEVTGDSCNNFMLTYNKVENMTPRDLGACIDCNARHINAQVAKSHNVSLIWNVKDYMSLSEQLRKQIRSAAKKNNIPFRLTCATTRQVVNVITTKISLKGGKIVSTCFKLMLKATLLCVLAALVCYIVMPVHTLSIHDGYTNEIIGYKAIQDGVTRDIISTDDCFANKHAGFDAWFSQRGGSYKNDKSCPVVAAIITREIGFIVPGLPGTVLRAINGDFLHFLPRVFSAVGNICYTPSKLIEYSDFATSACVLAAECTIFKDAMGKPVPYCYDTNLLEGSISYSELRPDTRYVLMDGSIIQFPNTYLEGSVRVVTTFDAEYCRHGTCERSEVGICLSTSGRWVLNNEHYRALSGVFCGVDAMNLIANIFTPLVQPVGALDVSASVVAGGIIAILVTCAAYYFMKFRRVFGEYNHVVAANALLFLMSFTILCLVPAYSFLPGVYSVFYLYLTFYFTNDVSFLAHLQWFAMFSPIVPFWITAIYVFCISLKHCHWFFNNYLRKRVMFNGVTFSTFEEAALCTFLLNKEMYLKLRSETLLPLTQYNRYLALYNKYKYFSGALDTTSYREAACCHLAKALNDFSNSGADVLYQPPQTSITSAVLQSGFRKMAFPSGKVEGCMVQVTCGTTTLNGLWLDDTVYCPRHVICTAEDMLNPNYEDLLIRKSNHSFLVQAGNVQLRVIGHSMQNCLLRLKVDTSNPKTPKYKFVRIQPGQTFSVLACYNGSPSGVYQCAMRPNHTIKGSFLNGSCGSVGFNIDYDCVSFCYMHHMELPTGVHAGTDLEGKFYGPFVDRQTAQAAGTDTTITLNVLAWLYAAVINGDRWFLNRFTTTLNDFNLVAMKYNYEPLTQDHVDILGPLSAQTGIAVLDMCAALKELLQNGMNGRTILGSTILEDEFTPFDVVRQCSGVTFQGKFKKIVKGTHHWMLLTFLTSLLILVQSTQWSLFFFVYENAFLPFTLGIMAIAACAMLLVKHKHAFLCLFLLPSLATVAYFNMVYMPASWVMRIMTWLELADTSLSGYRLKDCVMYASALVLLILMTARTVYDDAARRVWTLMNVITLVYKVYYGNALDQAISMWALVISVTSNYSGVVTTIMFLARAIVFVCVEYYPLLFITGNTLQCIMLVYCFLGYCCCCYFGLFCLLNRYFRLTLGVYDYLVSTQEFRYMNSQGLLPPKSSIDAFKLNIKLLGIGGKPCIKVATVQSKMSDVKCTSVVLLSVLQQLRVESSSKLWAQCVQLHNDILLAKDTTEAFEKMVSLLSVLLSMQGAVDINRLCEEMLDNRATLQAIASEFSSLPSYAAYATAQEAYEQAVANGDSEVVLKKLKKSLNVAKSEFDRDAAMQRKLEKMADQAMTQMYKQARSEDKRAKVTSAMQTMLFTMLRKLDNDALNNIINNARDGCVPLNIIPLTTAAKLMVVVPDYGTYKNTCDGNTFTYASALWEIQQVVDADSKIVQLSEINMDNSPNLAWPLIVTALRANSAVKLQNNELSPVALRQMSCAAGTTQTACTDDNALAYYNNSKGGRFVLALLSDHQDLKWARFPKSDGTGTIYTELEPPCRFVTDTPKGPKVKYLYFIKGLNNLNRGMVLGSLAATVRLQAGNATEVPANSTVLSFCAFAVDPAKAYKDYLASGGQPITNCVKMLCTHTGTGQAITVTPEANMDQESFGGASCCLYCRCHIDHPNPKGFCDLKGKYVQIPTTCANDPVGFTLRNTVCTVCGMWKGYGCSCDQLREPLMQSADASTFLNGFAV

SEQ ID NO: 6593 - protein, 34 aa, SARS coronavirus
VQPVLHRAAQALVLMSSTGLLIFTTKKLLVLQSS

SEQ ID NO: 6594 - protein, 16 aa, SARS coronavirus
KLIAVASRRRMRKAIY

SEQ ID NO: 6595 - protein, 4 aa, SARS coronavirus
TLTL

SEQ ID NO: 6596 - protein, 34 aa, SARS coronavirus
LRGILCLTTNMKRLFITWLKIVQRLLSMTFSSLE

SEQ ID NO: 6597 - protein, 12 aa, SARS coronavirus
MVTWYHIYHVSV

SEQ ID NO: 6598 - protein, 7 aa, SARS coronavirus
LNTQWLI

SEQ ID NO: 6599 - protein, 14 aa, SARS coronavirus
SMLYVILMRVIVIH

SEQ ID NO: 6600 - protein, 23 aa, SARS coronavirus
KKYSSHTIAVMMIISIRRIGMTS

SEQ ID NO: 6601 - protein, 11 aa, SARS coronavirus
RILTSYAYMLT

SEQ ID NO: 6602 - protein, 8 aa, SARS coronavirus
VSVYANHY

SEQ ID NO: 6603 - protein, 14 aa, SARS coronavirus
RLYNSAMLCVMQAL

SEQ ID NO: 6604 - protein, 17 aa, SARS coronavirus
IIRILMGTGTISVISYK

SEQ ID NO: 6605 - protein, 15 aa, SARS coronavirus
HQAAEFLLWIHITHC

SEQ ID NO: 6606 - protein, 5 aa, SARS coronavirus
CPSSL

SEQ ID NO: 6607 - protein, 23 aa, SARS coronavirus
LGHWLLSPIWMLISQNHLLSGIC

SEQ ID NO: 6608 - protein, 57 aa, SARS coronavirus
NMILRKRDFVSSTVILNIGTRHTIPIVLTVWMIGVSFIVQTLMCYFLLCFHLQVLDH

SEQ ID NO: 6609 - protein, 4 aa, SARS coronavirus
EKYL

SEQ ID NO: 6610 - protein, 15 aa, SARS coronavirus
MVFLLLFQLDTIFVS

SEQ ID NO: 6611 - protein, 7 aa, SARS coronavirus
ESYIIRM

SEQ ID NO: 6612 - protein, 12 aa, SARS coronavirus
TYIARVSVSRNF

SEQ ID NO: 6613 - protein, 16 aa, SARS coronavirus
CMLLIQLCMQLLAIYC

SEQ ID NO: 6614 - protein, 8 aa, SARS coronavirus
INALHAFQ

SEQ ID NO: 6615 - protein, 35 aa, SARS coronavirus
QTMLLFKLSNPVILIKTFMTLLCLKVSLRKEVLLN

SEQ ID NO: 6616 - protein, 34 aa, SARS coronavirus
NTSSLLRMATLLSVIMTIIVIICQQCVISDNSYS

SEQ ID NO: 6617 - protein, 20 aa, SARS coronavirus
LKLLINTLIVTMVAVLMPTK

SEQ ID NO: 6618 - protein, 25 aa, SARS coronavirus
SLTIWINQLVSHLINGVRLDFIMTQ

SEQ ID NO: 6619 - protein, 19 aa, SARS coronavirus
VMRIKMHFSRILSVMSSLL

SEQ ID NO: 6620 - protein, 14 aa, SARS coronavirus
ILSMPLVQRIELAP

SEQ ID NO: 6621 - protein, 8 aa, SARS coronavirus
LVSLSVVL

SEQ ID NO: 6622 - protein, 9 aa, SARS coronavirus
QIDSFIRNY

SEQ ID NO: 6623 - protein, 8 aa, SARS coronavirus
PPLEELLW

SEQ ID NO: 6624 - protein, 13 aa, SARS coronavirus
LEQASFTVAGIIC

SEQ ID NO: 6625 - protein, 6 aa, SARS coronavirus
KLFTVM

SEQ ID NO: 6626 - protein, 22 aa, SARS coronavirus
KLHTLWVGIIQNVTEPCLTCLG

SEQ ID NO: 6627 - protein, 22 aa, SARS coronavirus
WPLLFLLANITLAVTYHTVSTG

SEQ ID NO: 6628 - protein, 7 aa, SARS coronavirus
LTSVRKY

SEQ ID NO: 6629 - protein, 40 aa, SARS coronavirus
VRWSCVAAHYMLNQVEHHPVMLQLLMLIVSLTFVKLLQPM

SEQ ID NO: 6630 - protein, 10 aa, SARS coronavirus
MHFFQLMVIR

SEQ ID NO: 6631 - protein, 39 aa, SARS coronavirus
LTSMSAIYNTGSMSVSIEIGMLIMNSWMSFTLTCVNISP

SEQ ID NO: 6632 - protein, 18 aa, SARS coronavirus
FFLMMPLCAITVTMRLKV

SEQ ID NO: 6633 - protein, 42 aa, SARS coronavirus
LALRTLRQFFIIKIMCSCLRQNVGLRLTLLKDLTNFAHSIQC

SEQ ID NO: 6634 - protein, 18 aa, SARS coronavirus
LNKEMITCTCLTQIHQEY

SEQ ID NO: 6635 - protein, 16 aa, SARS coronavirus
AQAVLSMILSKQMVHL

SEQ ID NO: 6636 - protein, 49 aa, SARS coronavirus
LKGSCHWLLMLTHLQNILIRSMLMSFTCIYNTLESYMMSLLATCWTCIP

SEQ ID NO: 6637 - protein, 26 aa, SARS coronavirus
LMITPHGTGNLSFMRLCTHHIQSCRL

SEQ ID NO: 6638 - protein, 38 aa, SARS coronavirus
VLVYCAIHRLHFVAVPVLGDHSYVASAAMTMSFQHHTN

SEQ ID NO: 6639 - protein, 18 aa, SARS coronavirus
CCLLIPMFAMPQVVMSLM

SEQ ID NO: 6640 - protein, 4 aa, SARS coronavirus
HNCI

SEQ ID NO: 6641 - protein, 29 aa, SARS coronavirus
AIIASHISLPLVFHYVLMVRFLVYTKTHV

SEQ ID NO: 6642 - protein, 10 aa, SARS coronavirus
AVTMSLTSMR

SEQ ID NO: 6643 - protein, 66 aa, SARS coronavirus
QHVIGLMLAITYLPTLVLRDSSFSQQKRSKPLRKHLSCHMVLPLYAKYSLTENCIFHGRLENLDHH

SEQ ID NO: 6644 - protein, 10 aa, SARS coronavirus
TETMSLLVTV

SEQ ID NO: 6645 - protein, 31 aa, SARS coronavirus
LKIVKYRLESTPLKKVTMVMLLCTEVLRHTS

SEQ ID NO: 6646 - protein, 7 aa, SARS coronavirus
MLVITLC

SEQ ID NO: 6647 - protein, 4 aa, SARS coronavirus
HLTL

SEQ ID NO: 6648 - protein, 7 aa, SARS coronavirus
CHLVHLL

SEQ ID NO: 6649 - protein, 6 aa, SARS coronavirus
CHKSTM

SEQ ID NO: 6650 - protein, 56 aa, SARS coronavirus
ELLACTQHSTSQMSFLAMLQIIKRSACKSTLHSKDHLVLVRVILPSDLLSITHLLA

SEQ ID NO: 6651 - protein, 17 aa, SARS coronavirus
CIRHALMQLLMPYVKRH

SEQ ID NO: 6652 - protein, 4 aa, SARS coronavirus
NICP

SEQ ID NO: 6653 - protein, 12 aa, SARS coronavirus
INVVESYLRVRA

SEQ ID NO: 6654 - protein, 7 aa, SARS coronavirus
SVLINSK

SEQ ID NO: 6655 - protein, 7 aa, SARS coronavirus
NSMFSAL

SEQ ID NO: 6656 - protein, 10 aa, SARS coronavirus
MHCQKQLLTL

SEQ ID NO: 6657 - protein, 12 aa, SARS coronavirus
SLMKSLWLLIMT

SEQ ID NO: 6658 - protein, 27 aa, SARS coronavirus
VLSMLDFVQNTTSILAILLNYQPPAHC

SEQ ID NO: 6659 - protein, 4 aa, SARS coronavirus
LKAH

SEQ ID NO: 6660 - protein, 11 aa, SARS coronavirus
NQNILIQCADL

SEQ ID NO: 6661 - protein, 19 aa, SARS coronavirus
VQTCSLELVAVVLLKLLTL

SEQ ID NO: 6662 - protein, 5 aa, SARS coronavirus
FMTIS

SEQ ID NO: 6663 - protein, 31 aa, SARS coronavirus
KHTRISQLNASKCSTKVLLHMMFHLQSTDLK

SEQ ID NO: 6664 - protein, 24 aa, SARS coronavirus
ENFLHAILLGEKLFLSHLIIHRTL

SEQ ID NO: 6665 - protein, 4 aa, SARS coronavirus
LQKS

SEQ ID NO: 6666 - protein, 48 aa, SARS coronavirus
DCLRRLLIHHRVLNMTMSYSHKLLKQHTLVMSTASMWLSQGQKLAFCA

SEQ ID NO: 6667 - protein, 14 aa, SARS coronavirus
CLIEIFMTNCNLQV

SEQ ID NO: 6668 - protein, 14 aa, SARS coronavirus
KYHVAMWLHYKQKM

SEQ ID NO: 6669 - protein, 26 aa, SARS coronavirus
LDFLRTVVRSLLVFILHRHLHTSALI

SEQ ID NO: 6670 - protein, 17 aa, SARS coronavirus
SSRLKDYVLTYQAYQRT

SEQ ID NO: 6671 - protein, 7 aa, SARS coronavirus
PTVDSSL

SEQ ID NO: 6672 - protein, 4 aa, SARS coronavirus
WVSK

SEQ ID NO: 6673 - protein, 28 aa, SARS coronavirus
ITKSMVTLICLSPAKKLFVTFVRGLALM

SEQ ID NO: 6674 - protein, 17 aa, SARS coronavirus
RAVMQLEMLWVLTYLSS

SEQ ID NO: 6675 - protein, 7 aa, SARS coronavirus
DFLQVLT

SEQ ID NO: 6676 - protein, 42 aa, SARS coronavirus
LYRLVMLTLKITQNSPELMQNLHQVTSLNILYHSCIKACPGM

SEQ ID NO: 6677 - protein, 4 aa, SARS coronavirus
CVLR

SEQ ID NO: 6678 - protein, 7 aa, SARS coronavirus
YKCSVIH

SEQ ID NO: 6679 - protein, 20 aa, SARS coronavirus
KDCQTESCSSFGRMALSLHQ

SEQ ID NO: 6680 - protein, 45 aa, SARS coronavirus
STLSRLDLKERVVCVTNVQLAFLLHQILMPAGIILWVLTMSITHL

SEQ ID NO: 6681 - protein, 34 aa, SARS coronavirus
LMFSSGALRVTFRVTMTNIARYMEMHMWLVVMLS

SEQ ID NO: 6682 - protein, 18 aa, SARS coronavirus
QSMSALLSALIGLLNTLL

SEQ ID NO: 6683 - protein, 13 aa, SARS coronavirus
GLILLAEKYNTWL

SEQ ID NO: 6684 - protein, 28 aa, SARS coronavirus
SLHCLLISFQFFMTLEIQRLSSVCLRLK

SEQ ID NO: 6685 - protein, 16 aa, SARS coronavirus
NGSSTMLSHVVTKLTK

SEQ ID NO: 6686 - protein, 45 aa, SARS coronavirus
RNSSILMLHITINSLMVFVCFGIVTLIVTQPMQLCVGLTQESCQT

SEQ ID NO: 6687 - protein, 11 aa, SARS coronavirus
TYQAVMVVVCM

SEQ ID NO: 6688 - protein, 17 aa, SARS coronavirus
ISMHSTLQLSIKVHLLI

SEQ ID NO: 6689 - protein, 19 aa, SARS coronavirus
SNCLSFTILIVLVSLMANK

SEQ ID NO: 6690 - protein, 19 aa, SARS coronavirus
CRILIMFHSNLLRVLHDAI

SEQ ID NO: 6691 - protein, 20 aa, SARS coronavirus
VVLFADTMQMSTDSTWMHII

SEQ ID NO: 6692 - protein, 27 aa, SARS coronavirus
FLLDLAYGFTNNLILITCGIHLPGYRV

SEQ ID NO: 6693 - protein, 32 aa, SARS coronavirus
KMWLIMLLIKDTLMDTPAKHLFPSLIMLFTQR

SEQ ID NO: 6694 - protein, 48 aa, SARS coronavirus
MVLMWRSLKIRQHFLLMLHLSFGLSVTLNQCQRLRYSIIWVLISLLIL

SEQ ID NO: 6695 - protein, 14 aa, SARS coronavirus
SGTTKEKPQHMYLQ

SEQ ID NO: 6696 - protein, 4 aa, SARS coronavirus
VSAQ

SEQ ID NO: 6697 - protein, 26 aa, SARS coronavirus
LTLPRNLLRVLVLHLLSCLMVEWKDR

SEQ ID NO: 6698 - protein, 10 aa, SARS coronavirus
TFLETPVMVF

SEQ ID NO: 6699 - protein, 7 aa, SARS coronavirus
QKVQSKV

SEQ ID NO: 6700 - protein, 15 aa, SARS coronavirus
HLQRDQHKLASMESH

SEQ ID NO: 6701 - protein, 4 aa, SARS coronavirus
LENQ

SEQ ID NO: 6702 - protein, 9 aa, SARS coronavirus
KHSLTTLRK

SEQ ID NO: 6703 - protein, 17 aa, SARS coronavirus
TALFNSCLKPTLLRAET

SEQ ID NO: 6704 - protein, 49 aa, SARS coronavirus
RILSPDHKWKLTFSSSLWMNSYSDISSRAMPSNTSFMEISVMDNLAVFI

SEQ ID NO: 6705 - protein, 10 aa, SARS coronavirus
PSAHKIHHLN

SEQ ID NO: 6706 - protein, 9 aa, SARS coronavirus
RILSLWTAQ

SEQ ID NO: 6707 - protein, 4 aa, SARS coronavirus
KITS

SEQ ID NO: 6708 - protein, 13 aa, SARS coronavirus
QMRKQVHQNVCVL

SEQ ID NO: 6709 - protein, 10 aa, SARS coronavirus
LIFYLMTLSR

SEQ ID NO: 6710 - protein, 6 aa, SARS coronavirus
SHKICQ

SEQ ID NO: 6711 - protein, 72 aa, SARS coronavirus
FQKWSRLQLTMLKFHSCFGVRMDMLKPSTQNYKQVERGNQVLRCLTCTRCKECFLKSVTFRIMVKMLLYQKE

SEQ ID NO: 6712 - protein, 11 aa, SARS coronavirus
MSQSILNCVNT

SEQ ID NO: 6713 - protein, 4 aa, SARS coronavirus
IHLL

SEQ ID NO: 6714 - protein, 5 aa, SARS coronavirus
LYPTT

SEQ ID NO: 6715 - protein, 45 aa, SARS coronavirus
ELFTLVLALIKELHQVQLCSDNGCQLAHYLSIQILMTSSPTHILL

SEQ ID NO: 6716 - protein, 27 aa, SARS coronavirus
LETVQQYIRLINGTLLLAICMTLGPNM

SEQ ID NO: 6717 - protein, 17 aa, SARS coronavirus
QKRMTLKKGFSLICVDL

SEQ ID NO: 6718 - protein, 3 aa, SARS coronavirus
SKN

SEQ ID NO: 6719 - protein, 5 aa, SARS coronavirus
PWVVL

SEQ ID NO: 6720 - protein, 25 aa, SARS coronavirus
QSILGMLTFTSLWAISHGGQLLLQM

SEQ ID NO: 6721 - protein, 8 aa, SARS coronavirus
MHHHRKHF

SEQ ID NO: 6722 - protein, 40 aa, SARS coronavirus
LGLTILASRRNKLMAIPCMLTTFSGGTQILSSCLPIHSLT

SEQ ID NO: 6723 - protein, 6 aa, SARS coronavirus
ANFLLN

SEQ ID NO: 6724 - protein, 4 aa, SARS coronavirus
EELL

SEQ ID NO: 6725 - protein, 10 aa, SARS coronavirus
CLLRRIKSMI

SEQ ID NO: 6726 - protein, 67 aa, SARS coronavirus
FILFWKKVGLSLEKTTELWFQVIFLLTTKRTCLFSYYFLLSLVVVTLTGAPLLMMFKLLITLNILHL

SEQ ID NO: 6727 - protein, 16 aa, SARS coronavirus
GGFTILMKFLDQTLFI

SEQ ID NO: 6728 - protein, 52 aa, SARS coronavirus
LRIYFFHFILMLQGFILLIIRLATLSYLLRMVFILLPQRNQMLSVVGFLVLP

SEQ ID NO: 6729 - protein, 6 aa, SARS coronavirus
TTSHSR

SEQ ID NO: 6730 - protein, 36 aa, SARS coronavirus
LLLTILLMLLYEHVTLNCVTTLSLLFLNPWVHRHIL

SEQ ID NO: 6731 - protein, 51 aa, SARS coronavirus
YSIMHLIALSSTYLMPFRLMFQKSQVILNTYESLCLKIKMGFSMFIRAINL

SEQ ID NO: 6732 - protein, 10 aa, SARS coronavirus
FVIYLLVLTL

SEQ ID NO: 6733 - protein, 40 aa, SARS coronavirus
NLFLSCLLVLTLQILEPFLQPFHLLKTFGARQLQPILLAI

SEQ ID NO: 6734 - protein, 56 aa, SARS coronavirus
SQLHLCSSMMKMVQSQMLLIVLKIHLLNSNALLRALRLTKEFTRPLISGLFPQEML

SEQ ID NO: 6735 - protein, 59 aa, SARS coronavirus
DSLILQTCVLLERFLMLLNSLLSMHGREKKFLIVLLITLCSTTQHFFQPLSAMAFLPLS

SEQ ID NO: 6736 - protein, 13 aa, SARS coronavirus
MIFASPMSMQILL

SEQ ID NO: 6737 - protein, 5 aa, SARS coronavirus
SREMM

SEQ ID NO: 6738 - protein, 80 aa, SARS coronavirus
RQDKLVLLLIIIINCQMISWVVSLLGILGTLMLLQLVIIIINIGILDMASLGPLRETYLMCLSPLMANLAPHLLLIVIGH

SEQ ID NO: 6739 - protein, 18 aa, SARS coronavirus
MIMVFTPLLALATNLTEL

SEQ ID NO: 6740 - protein, 6 aa, SARS coronavirus
YFLLNF

SEQ ID NO: 6741 - protein, 33 aa, SARS coronavirus
MHRPRFVDQNYPLTLLRTSVSILILMDSLVLVC

SEQ ID NO: 6742 - protein, 32 aa, SARS coronavirus
LLLQRDFNHFNNLAVMFLISLIPFEILKHLKY

SEQ ID NO: 6743 - protein, 9 aa, SARS coronavirus
TFHLALLGV

SEQ ID NO: 6744 - protein, 53 aa, SARS coronavirus
LHLEQMLHLKLLFYIKMLTALMFLQQFMQINSHQLGAYILLETMYSRLKQAVL

SEQ ID NO: 6745 - protein, 43 aa, SARS coronavirus
ELSMSTLLMSATFLLELAFVLVTIQFLYYVVLAKNLLWLILCL

SEQ ID NO: 6746 - protein, 26 aa, SARS coronavirus
VLIVQLLTLITPLLYLLTFQLALLQK

SEQ ID NO: 6747 - protein, 9 aa, SARS coronavirus
CLFLWLKPP

SEQ ID NO: 6748 - protein, 26 aa, SARS coronavirus
IVICTSAEILLNVLICFSNMVAFAHN

SEQ ID NO: 6749 - protein, 30 aa, SARS coronavirus
IVHSQVLLLNRIATHVKCSLKSNKCTKPQL

SEQ ID NO: 6750 - protein, 15 aa, SARS coronavirus
NILVVLIFHKYYLTL

SEQ ID NO: 6751 - protein, 15 aa, SARS coronavirus
SQLRGLLLRTCSLIR

SEQ ID NO: 6752 - protein, 7 aa, SARS coronavirus
HSLMLAS

SEQ ID NO: 6753 - protein, 6 aa, SARS coronavirus
SNMANA

SEQ ID NO: 6754 - protein, 27 aa, SARS coronavirus
VILMLEISFVRRSSMDLQCCHLCSLMI

SEQ ID NO: 6755 - protein, 7 aa, SARS coronavirus
LLPTLLL

SEQ ID NO: 6756 - protein, 81 aa, SARS coronavirus
LVVLPLLDGHLVLALLFKYLLLCKWHIGSMALELPKMFSMRTKNKSPTNLTRRLVKFKNHLQQHQLHWASCKTLLTRMLKH

SEQ ID NO: 6757 - protein, 17 aa, SARS coronavirus
THLLNNLALILVQFQVC

SEQ ID NO: 6758 - protein, 18 aa, SARS coronavirus
MISFRDLIKSRRRYKLTG

SEQ ID NO: 6759 - protein, 11 aa, SARS coronavirus
LQADFKAFKPM

SEQ ID NO: 6760 - protein, 101 aa, SARS coronavirus
SGLLKSGLLLILLLLKCLSVFLDNQKELTFVERATTLCPSHKQPRMVLSSYMSRMCHPRRGTSPQRQQFVMKAKHTSLVKVFLCLMALLGLLHRGTSFLHK

SEQ ID NO: 6761 - protein, 78 aa, SARS coronavirus
LLQTIHLSQEIVMSLLASLTTQFMILCNLSLTHSKKSWTSTSKIIHHQMLILATFQALTLLSSTFKKKLTASMRSLKI

SEQ ID NO: 6762 - protein, 30 aa, SARS coronavirus
MNHSLTFKNWENMSNILNGLGMFGSASLLD

SEQ ID NO: 6763 - protein, 12 aa, SARS coronavirus
LPSSWLQSCFVA

SEQ ID NO: 6764 - protein, 59 aa, SARS coronavirus
LVVAVASRVHALVVLAASLMRMTLSQFSRVSNYITHKRTYGFVYEIFYSWINYCTASKN

SEQ ID NO: 6765 - protein, 45 aa, SARS coronavirus
QCFSCKYCSCYSNDTATSLTPFRMACYWRCISCCFSERYQNNCAQ

SEQ ID NO: 6766 - protein, 7 aa, SARS coronavirus
KMAASPL

SEQ ID NO: 6767 - protein, 46 aa, SARS coronavirus
GLPVHLQFTAAICYHLFTSFACRCRYGGAIFVPLCLDIFSTMHQRM

SEQ ID NO: 6768 - protein, 19 aa, SARS coronavirus
NYYEMLALLEVQIQEPITL

SEQ ID NO: 6769 - protein, 10 aa, SARS coronavirus
CQLLCLLAHT

SEQ ID NO: 6770 - protein, 5 aa, SARS coronavirus
LLYTI

SEQ ID NO: 6771 - protein, 9 aa, SARS coronavirus
QCHRYNCRY

SEQ ID NO: 6772 - protein, 17 aa, SARS coronavirus
RHFNTKTQRRLPNWWLF

SEQ ID NO: 6773 - protein, 4 aa, SARS coronavirus
ALRC

SEQ ID NO: 6774 - protein, 16 aa, SARS coronavirus
RLCRCTWLFHRSLLPA

SEQ ID NO: 6775 - protein, 10 aa, SARS coronavirus
VYTNYYRHWY

SEQ ID NO: 6776 - protein, 7 aa, SARS coronavirus
KCYILHL

SEQ ID NO: 6777 - protein, 17 aa, SARS coronavirus
RPTECANTHNRRLFRSC

SEQ ID NO: 6778 - protein, 7 aa, SARS coronavirus
SSNGSNL

SEQ ID NO: 6779 - protein, 5 aa, SARS coronavirus
ADDDY

SEQ ID NO: 6780 - protein, 8 aa, SARS coronavirus
RAFVSTRK

SEQ ID NO: 6781 - protein, 17 aa, SARS coronavirus
VRTYVLIRFGRNRYVNS

SEQ ID NO: 6782 - protein, 31 aa, SARS coronavirus
RTSFSCFRGILASHTSHPYCASIVCVLLQYC

SEQ ID NO: 6783 - protein, 14 aa, SARS coronavirus
REFSKTNGLRLLAC

SEQ ID NO: 6784 - protein, 5 aa, SARS coronavirus
KSELF

SEQ ID NO: 6785 - protein, 242 aa, SARS coronavirus
SSGLNELTIIIILFGTLTLLIMADNGTITVEELKQLLEQWNLVIGFLFLAWIMLLQFAYSNRNRFLYIIKLVFLWLLWPVTLACFVLAAVYRINWVTGGIAIAMACIVGLMWLSYFVASFRLFARTRSMWSFNPETNILLNVPLRGTIVTRPLMESELVIGAVIIRGHLRMAGHSLGRCDIKDLPKEITVATSRTLSYYKLGASQRVGTDSGFAAYNRYRIGNYKLNTDHAGSNDNIALLVQ

SEQ ID NO: 6786 - protein, 8 aa, SARS coronavirus
VTTDVSSC

SEQ ID NO: 6787 - protein, 23 aa, SARS coronavirus
LPGYNSRDIDYHYEDFQDCYLES

SEQ ID NO: 6788 - protein, 11 aa, SARS coronavirus
RYNKFNSETII

SEQ ID NO: 6789 - protein, 7 aa, SARS coronavirus
EELFGVR

SEQ ID NO: 6790 - protein, 12 aa, SARS coronavirus
RTYGVRLSIKRT

SEQ ID NO: 6791 - protein, 5 aa, SARS coronavirus
KLFSS

SEQ ID NO: 6792 - protein, 21 aa, SARS coronavirus
LYLHLASYITIRSVLEVRLYY

SEQ ID NO: 6793 - protein, 24 aa, SARS coronavirus
KNLAHQEHTRAIHHFTLLLTINLH

SEQ ID NO: 6794 - protein, 51 aa, SARS coronavirus
LALAHTLLLLVLTVLDIPISCVQDQFHQNFSSDKRRFNKSSTRHFFSLLLL

SEQ ID NO: 6795 - protein, 12 aa, SARS coronavirus
YFASPLRERQNE

SEQ ID NO: 6796 - protein, 4 aa, SARS coronavirus
AHFN

SEQ ID NO: 6797 - protein, 64 aa, SARS coronavirus
LLFVLFSLSAIPCFNNAYYILVFTRNPGSRRTLYQSLNEHETSHCFDLYFSMQLHMHCSTALCI

SEQ ID NO: 6798 - protein, 4 aa, SARS coronavirus
TSCA

SEQ ID NO: 6799 - protein, 16 aa, SARS coronavirus
GTTLGVILIALLGFVL

SEQ ID NO: 6800 - protein, 32 aa, SARS coronavirus
ERFYLFIDGTLWFKHAHLMLLSTVKIQLVVRL

SEQ ID NO: 6801 - protein, 21 aa, SARS coronavirus
LGVGTFMKVTKLLHLETYLLF

SEQ ID NO: 6802 - protein, 428 aa, SARS coronavirus
INEQIKMSDNGPQSNQRSAPRITFGGPTDSTDNNQNGGRNGARPKQRRPQGLPNNTASWFTALTQHGKEELRFPRGQGVPINTNSGPDDQIGYYRRATRRVRGGDGKMKELSPRWYFYYLGTGPEASLPYGANKEGIVWVATEGALNTPKDHIGTRNPNNNAATVLQLPQGTTLPKGFYAEGSRGGSQASSRSSSRSRGNSRNSTPGSSRGNSPARMASGGGETALALLLLDRLNQLESKVSGKGQQQQGQTVTKKSAAEASKKPRQKRTATKQYNVTQAFGRRGPEQTQGNFGDQDLIRQGTDYKHWPQIAQFAPSASAFFGMSRIGMEVTPSGTWLTYHGAIKLDDKDPQFKDNVILLNKHIDAYKTFPPTEPKKDKKKKTDEAQPLPQRQKKQPTVTLLPAADMDDFSRQLQNSMSGASADSTQA

SEQ ID NO: 6803 - protein, 12 aa, SARS coronavirus
TLMMTTQGRWAM

SEQ ID NO: 6804 - protein, 16 aa, SARS coronavirus
TFSQFRLRYIVYSCAE

SEQ ID NO: 6805 - protein, 8 aa, SARS coronavirus
ILVTKQHK

SEQ ID NO: 6806 - protein, 9 aa, SARS coronavirus
LTLISHSNL

SEQ ID NO: 6807 - protein, 28 aa, SARS coronavirus
SMCNIREDLKEPPHFHRGHAEYDRGYSE

SEQ ID NO: 6808 - protein, 11 aa, SARS coronavirus
GELPIWKSPNV

SEQ ID NO: 6809 - protein, 10 aa, SARS coronavirus
CYPHVILIAS

SEQ ID NO: 6810 - protein, 11 aa, SARS coronavirus
TQEKPTNLDLL

SEQ ID NO: 6811 - protein, 7 aa, SARS coronavirus
ICSLNEL

SEQ ID NO: 6812 - protein, 25 aa, SARS coronavirus
NLCSCRSAACLVHLRSINNNKFYCR

SEQ ID NO: 6813 - protein, 35 aa, SARS coronavirus
QETSNSSLFCRLLTVSSVLQSIISIPRFRPGVTER

SEQ ID NO: 6814 - protein, 23 aa, SARS coronavirus
DGEPCSWCQRENTRPTQFACPSG

SEQ ID NO: 6815 - protein, 19 aa, SARS coronavirus
RRASAWLRGLCGRGPIGGT

SEQ ID NO: 6816 - protein, 20 aa, SARS coronavirus
TPQKWHLWSSRAGKRRTAPA

SEQ ID NO: 6817 - protein, 6 aa, SARS coronavirus
TALCVH

SEQ ID NO: 6818 - protein, 11 aa, SARS coronavirus
CLKHQSRPQGR

SEQ ID NO: 6819 - protein, 12 aa, SARS coronavirus
AGCRNGRHSVRS

SEQ ID NO: 6820 - protein, 24 aa, SARS coronavirus
RYNTGSTRATCGRNPNCIPQCSSS

SEQ ID NO: 6821 - protein, 5 aa, SARS coronavirus
GSRWS

SEQ ID NO: 6822 - protein, 8 aa, SARS coronavirus
LWHRSKVL

SEQ ID NO: 6823 - protein, 4 aa, SARS coronavirus
RAWH

SEQ ID NO: 6824 - protein, 5 aa, SARS coronavirus
TKLEH

SEQ ID NO: 6825 - protein, 7 aa, SARS coronavirus
AWQWCTP

SEQ ID NO: 6826 - protein, 22 aa, SARS coronavirus
AQWRCSHSLCRQQFLWPRWVPS

SEQ ID NO: 6827 - protein, 20 aa, SARS coronavirus
LHQRFSRTRGQVNVHSFRTT

SEQ ID NO: 6828 - protein, 12 aa, SARS coronavirus
LHRVEERCLLLP

SEQ ID NO: 6829 - protein, 5 aa, SARS coronavirus
NCLVH

SEQ ID NO: 6830 - protein, 10 aa, SARS coronavirus
ELRAPDTLRN

SEQ ID NO: 6831 - protein, 5 aa, SARS coronavirus
ECQEI

SEQ ID NO: 6832 - protein, 13 aa, SARS coronavirus
HFQRGMPKVCVSS

SEQ ID NO: 6833 - protein, 10 aa, SARS coronavirus
LKSQSHSTTC

SEQ ID NO: 6834 - protein, 4 aa, SARS coronavirus
KEKD

SEQ ID NO: 6835 - protein, 18 aa, SARS coronavirus
GFHGAYTLCVPCCISTGV

SEQ ID NO: 6836 - protein, 10 aa, SARS coronavirus
QYALVYLDEM

SEQ ID NO: 6837 - protein, 13 aa, SARS coronavirus
SFMADVRLSESHL

SEQ ID NO: 6838 - protein, 4 aa, SARS coronavirus
TLWH

SEQ ID NO: 6839 - protein, 4 aa, SARS coronavirus
KFSY

SEQ ID NO: 6840 - protein, 10 aa, SARS coronavirus
RTYYMWVPTY

SEQ ID NO: 6841 - protein, 17 aa, SARS coronavirus
CCSENAMSCLSRPRDWT

SEQ ID NO: 6842 - protein, 10 aa, SARS coronavirus
CCRLSQPLKH

SEQ ID NO: 6843 - protein, 7 aa, SARS coronavirus
NSTPQGR

SEQ ID NO: 6844 - protein, 13 aa, SARS coronavirus
MFWRLCVCLCWLL

SEQ ID NO: 6845 - protein, 8 aa, SARS coronavirus
ACLLGSSC

SEQ ID NO: 6846 - protein, 10 aa, SARS coronavirus
YWLRPYWHYW

SEQ ID NO: 6847 - protein, 6 aa, SARS coronavirus
QCGDLE

SEQ ID NO: 6848 - protein, 4 aa, SARS coronavirus
DTES

SEQ ID NO: 6849 - protein, 8 aa, SARS coronavirus
HCWRFSFE

SEQ ID NO: 6850 - protein, 17 aa, SARS coronavirus
RGCHHFGIFLCFYKCLY

SEQ ID NO: 6851 - protein, 5 aa, SARS coronavirus
HYKES

SEQ ID NO: 6852 - protein, 8 aa, SARS coronavirus
LQVFQNHC

SEQ ID NO: 6853 - protein, 42 aa, SARS coronavirus
SYQGKARKRCLEHWTTEISFNTTVWFSLTGCWCYQINFCAHT

SEQ ID NO: 6854 - protein, 7 aa, SARS coronavirus
CSKPLNS

SEQ ID NO: 6855 - protein, 9 aa, SARS coronavirus
FAKSSCHHT

SEQ ID NO: 6856 - protein, 39 aa, SARS coronavirus
TVITSCRRHGLYFRPAHQQCHYYGICNWWSCTTDFSVVV

SEQ ID NO: 6857 - protein, 6 aa, SARS coronavirus
SFGHYC

SEQ ID NO: 6858 - protein, 6 aa, SARS coronavirus
KTQAYL

SEQ ID NO: 6859 - protein, 17 aa, SARS coronavirus
ISQGCLGDSQISHYRCF

SEQ ID NO: 6860 - protein, 11 aa, SARS coronavirus
HRQGSNTGCFR

SEQ ID NO: 6861 - protein, 9 aa, SARS coronavirus
HQGLCKMLH

SEQ ID NO: 6862 - protein, 7 aa, SARS coronavirus
QGTRNVH

SEQ ID NO: 6863 - protein, 15 aa, SARS coronavirus
SSHYRWRKVAITQLR

SEQ ID NO: 6864 - protein, 26 aa, SARS coronavirus
SLHRSKQGTLPSVYTWQGAAATTHAS

SEQ ID NO: 6865 - protein, 8 aa, SARS coronavirus
GTKRSNLS

SEQ ID NO: 6866 - protein, 5 aa, SARS coronavirus
HSTYL

SEQ ID NO: 6867 - protein, 7 aa, SARS coronavirus
GGCSQER

SEQ ID NO: 6868 - protein, 8 aa, SARS coronavirus
TRSTRDAR

SEQ ID NO: 6869 - protein, 21 aa, SARS coronavirus
LHKWSYRRHTSLCKWPHALRD

SEQ ID NO: 6870 - protein, 27 aa, SARS coronavirus
GQRTILRIVSWFTGYKQCLSLKRGCTN

SEQ ID NO: 6871 - protein, 22 aa, SARS coronavirus
RCNLWRRYCLGSSRLQECENHI

SEQ ID NO: 6872 - protein, 7 aa, SARS coronavirus
KVLCLHC

SEQ ID NO: 6873 - protein, 6 aa, SARS coronavirus
IRYRSY

SEQ ID NO: 6874 - protein, 17 aa, SARS coronavirus
VCMCCSRGCCEDFTTSF

SEQ ID NO: 6875 - protein, 7 aa, SARS coronavirus
SPYQHGY

SEQ ID NO: 6876 - protein, 9 aa, SARS coronavirus
VECSYILLI

SEQ ID NO: 6877 - protein, 15 aa, SARS coronavirus
RKLFITYVLFLLPSR

SEQ ID NO: 6878 - protein, 8 aa, SARS coronavirus
GRRGRCRV

SEQ ID NO: 6879 - protein, 4 aa, SARS coronavirus
GRRN

SEQ ID NO: 6880 - protein, 5 aa, SARS coronavirus
VRYRG

SEQ ID NO: 6881 - protein, 12 aa, SARS coronavirus
LSRSPSGIWCLS

SEQ ID NO: 6882 - protein, 4 aa, SARS coronavirus
NSSS

SEQ ID NO: 6883 - protein, 9 aa, SARS coronavirus
GRRRGRLAG

SEQ ID NO: 6884 - protein, 4 aa, SARS coronavirus
AIRD

SEQ ID NO: 6885 - protein, 7 aa, SARS coronavirus
ARTRTYT

SEQ ID NO: 6886 - protein, 9 aa, SARS coronavirus
SVYWLFKTY

SEQ ID NO: 6887 - protein, 4 aa, SARS coronavirus
QCCH

SEQ ID NO: 6888 - protein, 5 aa, SARS coronavirus
GGTKC

SEQ ID NO: 6889 - protein, 8 aa, SARS coronavirus
SYGDCKCC

SEQ ID NO: 6890 - protein, 25 aa, SARS coronavirus
HTPETWWWCSRCTQQGNQWCHAKGE

SEQ ID NO: 6891 - protein, 16 aa, SARS coronavirus
AKWPSYSRRVLFAFWT

SEQ ID NO: 6892 - protein, 8 aa, SARS coronavirus
EVSACCWT

SEQ ID NO: 6893 - protein, 4 aa, SARS coronavirus
PKCR

SEQ ID NO: 6894 - protein, 5 aa, SARS coronavirus
GHPAS

SEQ ID NO: 6895 - protein, 20 aa, SARS coronavirus
KFQFTGHLTCTIVVSRHIWC

SEQ ID NO: 6896 - protein, 21 aa, SARS coronavirus
TTSVFTSVRADGSYTGLYCSQ

SEQ ID NO: 6897 - protein, 4 aa, SARS coronavirus
QSSL

SEQ ID NO: 6898 - protein, 7 aa, SARS coronavirus
AGCHGLS

SEQ ID NO: 6899 - protein, 4 aa, SARS coronavirus
SGST

SEQ ID NO: 6900 - protein, 12 aa, SARS coronavirus
TRGATKHRRFQN

SEQ ID NO: 6901 - protein, 15 aa, SARS coronavirus
GEICRTEACRCEAKN

SEQ ID NO: 6902 - protein, 8 aa, SARS coronavirus
GYHNTGRN

SEQ ID NO: 6903 - protein, 4 aa, SARS coronavirus
VSYQ

SEQ ID NO: 6904 - protein, 5 aa, SARS coronavirus
VTLVC

SEQ ID NO: 6905 - protein, 5 aa, SARS coronavirus
FSEHA

SEQ ID NO: 6906 - protein, 5 aa, SARS coronavirus
RYVFP

SEQ ID NO: 6907 - protein, 8 aa, SARS coronavirus
EGCTLHGR

SEQ ID NO: 6908 - protein, 15 aa, SARS coronavirus
YHLCCNTLQKGWWHY

SEQ ID NO: 6909 - protein, 11 aa, SARS coronavirus
DALKSFEESAS

SEQ ID NO: 6910 - protein, 15 aa, SARS coronavirus
VYNHVPWTRMCWLYT

SEQ ID NO: 6911 - protein, 14 aa, SARS coronavirus
EMQICILCTTFRST

SEQ ID NO: 6912 - protein, 18 aa, SARS coronavirus
GRDSRNCILEFERNACSC

SEQ ID NO: 6913 - protein, 12 aa, SARS coronavirus
RDKKINAYMHGC

SEQ ID NO: 6914 - protein, 8 aa, SARS coronavirus
SHNGNHPT

SEQ ID NO: 6915 - protein, 6 aa, SARS coronavirus
NSRGHR

SEQ ID NO: 6916 - protein, 9 aa, SARS coronavirus
LWCPILLLY

SEQ ID NO: 6917 - protein, 14 aa, SARS coronavirus
RACSFYYYEAELSK

SEQ ID NO: 6918 - protein, 14 aa, SARS coronavirus
AACHNANWLCDTWF

SEQ ID NO: 6919 - protein, 9 aa, SARS coronavirus
RGCALYAFS

SEQ ID NO: 6920 - protein, 16 aa, SARS coronavirus
SSCRSVSIITRCCYYI

SEQ ID NO: 6921 - protein, 10 aa, SARS coronavirus
WIPHFVIKDI

SEQ ID NO: 6922 - protein, 27 aa, SARS coronavirus
GALCRNSFFGWLLQRLVLFRTAYRVRC

SEQ ID NO: 6923 - protein, 15 aa, SARS coronavirus
QNCVPHSGEPRRVSS

SEQ ID NO: 6924 - protein, 4 aa, SARS coronavirus
GSFT

SEQ ID NO: 6925 - protein, 11 aa, SARS coronavirus
QTKESLIPAGG

SEQ ID NO: 6926 - protein, 11 aa, SARS coronavirus
DYKSVHNCGQH

SEQ ID NO: 6927 - protein, 24 aa, SARS coronavirus
SPHTACGYVYDIWTAVWSNILGWC

SEQ ID NO: 6928 - protein, 4 aa, SARS coronavirus
CYKN

SEQ ID NO: 6929 - protein, 5 aa, SARS coronavirus
TSCKS

SEQ ID NO: 6930 - protein, 6 aa, SARS coronavirus
DFLCTT

SEQ ID NO: 6931 - protein, 8 aa, SARS coronavirus
SFRVLPYS

SEQ ID NO: 6932 - protein, 4 aa, SARS coronavirus
EFSW

SEQ ID NO: 6933 - protein, 22 aa, SARS coronavirus
VHVCFKPHKEMEISSSWWFNFN

SEQ ID NO: 6934 - protein, 5 aa, SARS coronavirus
QLLFV

SEQ ID NO: 6935 - protein, 8 aa, SARS coronavirus
CFISTSTA

SEQ ID NO: 6936 - protein, 13 aa, SARS coronavirus
SQIQCTSTSRGLL

SEQ ID NO: 6937 - protein, 4 aa, SARS coronavirus
SPCW

SEQ ID NO: 6938 - protein, 9 aa, SARS coronavirus
LLCTHTRLQ

SEQ ID NO: 6939 - protein, 6 aa, SARS coronavirus
NCWRAW

SEQ ID NO: 6940 - protein, 12 aa, SARS coronavirus
CQRNYDPSSTAC

SEQ ID NO: 6941 - protein, 8 aa, SARS coronavirus
FGICKASS

SEQ ID NO: 6942 - protein, 23 aa, SARS coronavirus
TLWSENYYLNGCRSCDVYGYSIL

SEQ ID NO: 6943 - protein, 11 aa, SARS coronavirus
DRCFHSMCVWS

SEQ ID NO: 6944 - protein, 20 aa, SARS coronavirus
CYTISSTTRVFFCYDVCTTC

SEQ ID NO: 6945 - protein, 10 aa, SARS coronavirus
ITARYILMCE

SEQ ID NO: 6946 - protein, 11 aa, SARS coronavirus
LSVWSLHSYNC

SEQ ID NO: 6947 - protein, 6 aa, SARS coronavirus
GDPLSY

SEQ ID NO: 6948 - protein, 15 aa, SARS coronavirus
RSSPYKDVRVQRTSD

SEQ ID NO: 6949 - protein, 17 aa, SARS coronavirus
CFLQGNILHYNHQACVV

SEQ ID NO: 6950 - protein, 9 aa, SARS coronavirus
TRWSYLHRD

SEQ ID NO: 6951 - protein, 7 aa, SARS coronavirus
TKIGWVL

SEQ ID NO: 6952 - protein, 21 aa, SARS coronavirus
CLLYRAAYRPCTNSTITKCEF

SEQ ID NO: 6953 - protein, 6 aa, SARS coronavirus
FQTHMF

SEQ ID NO: 6954 - protein, 4 aa, SARS coronavirus
HKIC

SEQ ID NO: 6955 - protein, 30 aa, SARS coronavirus
FKSNDRLHKASFTRAICHILPRLEWRCSGY

SEQ ID NO: 6956 - protein, 10 aa, SARS coronavirus
TLFSEFQERC

SEQ ID NO: 6957 - protein, 6 aa, SARS coronavirus
ANCLAH

SEQ ID NO: 6958 - protein, 30 aa, SARS coronavirus
PGYNQDNVQTKHLVFTLSLEYKASRYFKFI

SEQ ID NO: 6959 - protein, 15 aa, SARS coronavirus
SSGSRRHTRNGQSCL

SEQ ID NO: 6960 - protein, 6 aa, SARS coronavirus
KSTTHL

SEQ ID NO: 6961 - protein, 15 aa, SARS coronavirus
RSSGKSYHTEGSHRV

SEQ ID NO: 6962 - protein, 12 aa, SARS coronavirus
RENYRSCRQCHT

SEQ ID NO: 6963 - protein, 7 aa, SARS coronavirus
SNTRVRS

SEQ ID NO: 6964 - protein, 14 aa, SARS coronavirus
GSYGCLCGKHKHYH

SEQ ID NO: 6965 - protein, 18 aa, SARS coronavirus
AFTSLRFKNNCHSWYCCN

SEQ ID NO: 6966 - protein, 4 aa, SARS coronavirus
CSLE

SEQ ID NO: 6967 - protein, 20 aa, SARS coronavirus
NFGLCQTILRTSSNYNIKLR

SEQ ID NO: 6968 - protein, 7 aa, SARS coronavirus
EISTTCV

SEQ ID NO: 6969 - protein, 17 aa, SARS coronavirus
QLYALCVYIIVPIVYFY

SEQ ID NO: 6970 - protein, 4 aa, SARS coronavirus
KYQF

SEQ ID NO: 6971 - protein, 8 aa, SARS coronavirus
SFTTYNYC

SEQ ID NO: 6972 - protein, 7 aa, SARS coronavirus
IMFGCRH

SEQ ID NO: 6973 - protein, 8 aa, SARS coronavirus
LCEVTQIF

SEQ ID NO: 6974 - protein, 30 aa, SARS coronavirus
IVHNRYVAIVVKYLLRFSNLCNCCFWCTLI

SEQ ID NO: 6975 - protein, 7 aa, SARS coronavirus
FWCSFLL

SEQ ID NO: 6976 - protein, 4 aa, SARS coronavirus
RIVS

SEQ ID NO: 6977 - protein, 7 aa, SARS coronavirus
RYYYGFL

SEQ ID NO: 6978 - protein, 15 aa, SARS coronavirus
RFFSLQHLFKWIRLP

SEQ ID NO: 6979 - protein, 5 aa, SARS coronavirus
FLSSS

SEQ ID NO: 6980 - protein, 20 aa, SARS coronavirus
NHSGDDFIVQARLDNFRSGR

SEQ ID NO: 6981 - protein, 29 aa, SARS coronavirus
VGFGIYVVHKILLFIRSFSYNAGVLWLFC

SEQ ID NO: 6982 - protein, 13 aa, SARS coronavirus
SFHQQFLAHVVYH

SEQ ID NO: 6983 - protein, 11 aa, SARS coronavirus
YCTNGTRFCNG

SEQ ID NO: 6984 - protein, 31 aa, SARS coronavirus
DVHLLCFFLLHMEELCSYHGWLHLFDLHDVL

SEQ ID NO: 6985 - protein, 7 aa, SARS coronavirus
AQSCHTR

SEQ ID NO: 6986 - protein, 5 aa, SARS coronavirus
VYNYC

SEQ ID NO: 6987 - protein, 27 aa, SARS coronavirus
WHEEIFLCLCKWRPWLLQDSQLELSQL

SEQ ID NO: 6988 - protein, 5 aa, SARS coronavirus
HILHW

SEQ ID NO: 6989 - protein, 5 aa, SARS coronavirus
FVTPV

SEQ ID NO: 6990 - protein, 6 aa, SARS coronavirus
KTNQPY

SEQ ID NO: 6991 - protein, 6 aa, SARS coronavirus
PVIVYC

SEQ ID NO: 6992 - protein, 12 aa, SARS coronavirus
CCCEKWRASPLL

SEQ ID NO: 6993 - protein, 7 aa, SARS coronavirus
QGWSKDL

SEQ ID NO: 6994 - protein, 15 aa, SARS coronavirus
ETSALPFCQFRQFES

SEQ ID NO: 6995 - protein, 5 aa, SARS coronavirus
RFTAY

SEQ ID NO: 6996 - protein, 4 aa, SARS coronavirus
CHSF

SEQ ID NO: 6997 - protein, 10 aa, SARS coronavirus
WQVQMRRVCF

SEQ ID NO: 6998 - protein, 17 aa, SARS coronavirus
VCFCVLQSADVPTYSVA

SEQ ID NO: 6999 - protein, 9 aa, SARS coronavirus
PSSCIRRWR

SEQ ID NO: 7000 - protein, 10 aa, SARS coronavirus
CLCRHLFSNF

SEQ ID NO: 7001 - protein, 6 aa, SARS coronavirus
CSYGKT

SEQ ID NO: 7002 - protein, 32 aa, SARS coronavirus
GTCCYSSQRVSKGCSFRWCPFYIRVSCPTRCC

SEQ ID NO: 7003 - protein, 5 aa, SARS coronavirus
HKGCY

SEQ ID NO: 7004 - protein, 8 aa, SARS coronavirus
MSQTFTSL

SEQ ID NO: 7005 - protein, 5 aa, SARS coronavirus
LRSDR

SEQ ID NO: 7006 - protein, 6 aa, SARS coronavirus
QFHAHL

SEQ ID NO: 7007 - protein, 11 aa, SARS coronavirus
KHDAQRSWRMY

SEQ ID NO: 7008 - protein, 27 aa, SARS coronavirus
CKAYQCPSSKKSQCFTHLECKRLHVFI

SEQ ID NO: 7009 - protein, 9 aa, SARS coronavirus
CCQEEQHTF

SEQ ID NO: 7010 - protein, 6 aa, SARS coronavirus
TNLCYN

SEQ ID NO: 7011 - protein, 8 aa, SARS coronavirus
TGCQCHNY

SEQ ID NO: 7012 - protein, 6 aa, SARS coronavirus
NLTQGW

SEQ ID NO: 7013 - protein, 24 aa, SARS coronavirus
GHIIVRSCCIGLLYRYASTYIVNP

SEQ ID NO: 7014 - protein, 4 aa, SARS coronavirus
WLHK

SEQ ID NO: 7015 - protein, 13 aa, SARS coronavirus
NHWLQSHSGWCHS

SEQ ID NO: 7016 - protein, 4 aa, SARS coronavirus
HHFY

SEQ ID NO: 7017 - protein, 4 aa, SARS coronavirus
LFCK

SEQ ID NO: 7018 - protein, 4 aa, SARS coronavirus
TCWF

SEQ ID NO: 7019 - protein, 8 aa, SARS coronavirus
PAWWFIQK

SEQ ID NO: 7020 - protein, 31 aa, SARS coronavirus
QKLPCSSCYHYKRDWFHSAWLTGYCAESNQW

SEQ ID NO: 7021 - protein, 9 aa, SARS coronavirus
LLAFSTSCF

SEQ ID NO: 7022 - protein, 13 aa, SARS coronavirus
CCWQHLLHTFQTH

SEQ ID NO: 7023 - protein, 10 aa, SARS coronavirus
FCYLCLRSCC

SEQ ID NO: 7024 - protein, 4 aa, SARS coronavirus
VYNF

SEQ ID NO: 7025 - protein, 11 aa, SARS coronavirus
GCYGQTCAILL

SEQ ID NO: 7026 - protein, 8 aa, SARS coronavirus
FARGFYFL

SEQ ID NO: 7027 - protein, 18 aa, SARS coronavirus
ASSRHSLCAYGWFHHTVS

SEQ ID NO: 7028 - protein, 7 aa, SARS coronavirus
HLPGGFC

SEQ ID NO: 7029 - protein, 5 aa, SARS coronavirus
SSNNF

SEQ ID NO: 7030 - protein, 17 aa, SARS coronavirus
TWYMRKVRSRYLPIYQW

SEQ ID NO: 7031 - protein, 12 aa, SARS coronavirus
ALQSSIRSFLWC

SEQ ID NO: 7032 - protein, 6 aa, SARS coronavirus
CDESHS

SEQ ID NO: 7033 - protein, 43 aa, SARS coronavirus
HLYSSCATCGCFRCVCFSSGWWYYCHIGDLCCLLLYEIQTCFW

SEQ ID NO: 7034 - protein, 7 aa, SARS coronavirus
VQPCCCC

SEQ ID NO: 7035 - protein, 37 aa, SARS coronavirus
CTFVFDVFHYTLSGTSLQLSAGSLLSLLLVLDILFHQ

SEQ ID NO: 7036 - protein, 38 aa, SARS coronavirus
CFILGSPSMVCHVFSYCAFLDNSNLCILYFSEALPLVL

SEQ ID NO: 7037 - protein, 5 aa, SARS coronavirus
EKSHV

SEQ ID NO: 7038 - protein, 4 aa, SARS coronavirus
WSYI

SEQ ID NO: 7039 - protein, 21 aa, SARS coronavirus
YLRGGCFVYLFAQQGNVPKIA

SEQ ID NO: 7040 - protein, 9 aa, SARS coronavirus
RDTVATYTV

SEQ ID NO: 7041 - protein, 6 aa, SARS coronavirus
QVSCSI

SEQ ID NO: 7042 - protein, 15 aa, SARS coronavirus
QVQVFQWSLRYYQLS

SEQ ID NO: 7043 - protein, 11 aa, SARS coronavirus
SSLLPLSKGSK

SEQ ID NO: 7044 - protein, 4 aa, SARS coronavirus
QLRC

SEQ ID NO: 7045 - protein, 19 aa, SARS coronavirus
CSLPTTTDINHFCCSAEWF

SEQ ID NO: 7046 - protein, 9 aa, SARS coronavirus
ENGIPVRQS

SEQ ID NO: 7047 - protein, 13 aa, SARS coronavirus
RVHGTSNLWNYNS

SEQ ID NO: 7048 - protein, 5 aa, SARS coronavirus
WIVVG

SEQ ID NO: 7049 - protein, 16 aa, SARS coronavirus
HSILSKTCHLHSRRHA

SEQ ID NO: 7050 - protein, 9 aa, SARS coronavirus
RSAHSQIQP

SEQ ID NO: 7051 - protein, 22 aa, SARS coronavirus
LSCSGWQCSTSCYWPFYAKLSA

SEQ ID NO: 7052 - protein, 4 aa, SARS coronavirus
DTQV

SEQ ID NO: 7053 - protein, 30 aa, SARS coronavirus
ICPYPTWSNIFSSSMLQWFTIWCLSVCHET

SEQ ID NO: 7054 - protein, 4 aa, SARS coronavirus
RFFP

SEQ ID NO: 7055 - protein, 4 aa, SARS coronavirus
WIMW

SEQ ID NO: 7056 - protein, 20 aa, SARS coronavirus
LRVFLLYASYGASNRSTRWY

SEQ ID NO: 7057 - protein, 6 aa, SARS coronavirus
ILWSIC

SEQ ID NO: 7058 - protein, 28 aa, SARS coronavirus
QTNCTGCRYRHNHNIKCFGMAVCCCYQW

SEQ ID NO: 7059 - protein, 6 aa, SARS coronavirus
IHHYFE

SEQ ID NO: 7060 - protein, 8 aa, SARS coronavirus
PCGNEVQL

SEQ ID NO: 7061 - protein, 7 aa, SARS coronavirus
TFDTRSC

SEQ ID NO: 7062 - protein, 35 aa, SARS coronavirus
HIGTSFCSNRNCRLRYVCCFERAAAEWYEWSYYPW

SEQ ID NO: 7063 - protein, 5 aa, SARS coronavirus
HYFRR

SEQ ID NO: 7064 - protein, 4 aa, SARS coronavirus
VYTI

SEQ ID NO: 7065 - protein, 9 aa, SARS coronavirus
TMLWCYLPR

SEQ ID NO: 7066 - protein, 5 aa, SARS coronavirus
VQENC

SEQ ID NO: 7067 - protein, 52 aa, SARS coronavirus
GHSSLDAFNFLDITIDSCSKYTVVTVFLCLRECFLAIYSWYYGNCCMCYAAC

SEQ ID NO: 7068 - protein, 18 aa, SARS coronavirus
ARILVLVSVTFSCNSCLL

SEQ ID NO: 7069 - protein, 6 aa, SARS coronavirus
YGLHAC

SEQ ID NO: 7070 - protein, 9 aa, SARS coronavirus
LGDAYHDMA

SEQ ID NO: 7071 - protein, 4 aa, SARS coronavirus
LVWL

SEQ ID NO: 7072 - protein, 21 aa, SARS coronavirus
GLCYVCFSFSFAYSHDSSHCL

SEQ ID NO: 7073 - protein, 18 aa, SARS coronavirus
TCLDTDECHYTCLQSLLW

SEQ ID NO: 7074 - protein, 17 aa, SARS coronavirus
CFRSSYFHVGLSYFCNL

SEQ ID NO: 7075 - protein, 12 aa, SARS coronavirus
LFWCRYDYHVFS

SEQ ID NO: 7076 - protein, 7 aa, SARS coronavirus
SYSVCVC

SEQ ID NO: 7077 - protein, 47 aa, SARS coronavirus
VLPIVIYYWQHLTVYHACLLFLRLLLLLLLWPFLFTQPLLQAYSWCL

SEQ ID NO: 7078 - protein, 8 aa, SARS coronavirus
LLGLYTRI

SEQ ID NO: 7079 - protein, 10 aa, SARS coronavirus
VYELPGAFAS

SEQ ID NO: 7080 - protein, 4 aa, SARS coronavirus
CFQA

SEQ ID NO: 7081 - protein, 6 aa, SARS coronavirus
VVGYWR

SEQ ID NO: 7082 - protein, 10 aa, SARS coronavirus
TMYQGCYCTV

SEQ ID NO: 7083 - protein, 15 aa, SARS coronavirus
RKVHICGTALGSSTT

SEQ ID NO: 7084 - protein, 5 aa, SARS coronavirus
SRVIF

SEQ ID NO: 7085 - protein, 10 aa, SARS coronavirus
IVGTMCTTPQ

SEQ ID NO: 7086 - protein, 8 aa, SARS coronavirus
YSSCKRHN

SEQ ID NO: 7087 - protein, 21 aa, SARS coronavirus
SFREDGFSFVCFAIHAGCCRH

SEQ ID NO: 7088 - protein, 7 aa, SARS coronavirus
VVRGNAR

SEQ ID NO: 7089 - protein, 11 aa, SARS coronavirus
PCYSSGYCFRI

SEQ ID NO: 7090 - protein, 15 aa, SARS coronavirus
FFTIICRLCHCPGGL

SEQ ID NO: 7091 - protein, 4 aa, SARS coronavirus
AGCS

SEQ ID NO: 7092 - protein, 13 aa, SARS coronavirus
SRSQKVKEIFECG

SEQ ID NO: 7093 - protein, 24 aa, SARS coronavirus
CCHATQVGKDGRSGYDPNVQTGKI

SEQ ID NO: 7094 - protein, 7 aa, SARS coronavirus
GQEGKSN

SEQ ID NO: 7095 - protein, 10 aa, SARS coronavirus
CYANNALHYA

SEQ ID NO: 7096 - protein, 7 aa, SARS coronavirus
QHYQQCA

SEQ ID NO: 7097 - protein, 21 aa, SARS coronavirus
WLCSTQHHTIDYSSQTHGCCP

SEQ ID NO: 7098 - protein, 8 aa, SARS coronavirus
LWYLQEHL

SEQ ID NO: 7099 - protein, 15 aa, SARS coronavirus
HLYICICTLGNPASC

SEQ ID NO: 7100 - protein, 5 aa, SARS coronavirus
QDCST

SEQ ID NO: 7101 - protein, 22 aa, SARS coronavirus
HGQFTKFGLASYCYSSKSQLSC

SEQ ID NO: 7102 - protein, 21 aa, SARS coronavirus
TESSSTTTDVLCGWYHTNSLY

SEQ ID NO: 7103 - protein, 6 aa, SARS coronavirus
QCTCLL

SEQ ID NO: 7104 - protein, 5 aa, SARS coronavirus
QFEGR

SEQ ID NO: 7105 - protein, 15 aa, SARS coronavirus
VCAGITIRPPRSQMG

SEQ ID NO: 7106 - protein, 13 aa, SARS coronavirus
WYRYNLHRTGTTL

SEQ ID NO: 7107 - protein, 9 aa, SARS coronavirus
VCYRHTKRA

SEQ ID NO: 7108 - protein, 14 aa, SARS coronavirus
SEILVLHQRLKQPK

SEQ ID NO: 7109 - protein, 38 aa, SARS coronavirus
RYGAGQFSCYSTSSGWKCYRSTCQFNCAFLLCFCSRPC

SEQ ID NO: 7110 - protein, 33 aa, SARS coronavirus
GLPSKWRTTNHQLCEDVVYTHWYRTGNYCNTRS

SEQ ID NO: 7111 - protein, 15 aa, SARS coronavirus
HGPRVLWWCFMLSVL

SEQ ID NO: 7112 - protein, 4 aa, SARS coronavirus
PSKS

SEQ ID NO: 7113 - protein, 9 aa, SARS coronavirus
VRPNTYHLC

SEQ ID NO: 7114 - protein, 6 aa, SARS coronavirus
PSGFYT

SEQ ID NO: 7115 - protein, 15 aa, SARS coronavirus
KHSLYRLRNVERLWL

SEQ ID NO: 7116 - protein, 2712 aa, SARS coronavirus
PTPRTLDAVCGCINVFKRVCGVSAARLTPCGTGTSTDVVYRAFDIYNEKVAGFAKFLKTNCCRFQEKDEEGNLLDSYFVVKRHTMSNYQHEETIYNLVKDCPAVAVHDFFKFRVDGDMVPHISRQRLTKYTMADLVYALRHFDEGNCDTLKEILVTYNCCDDDYFNKKDWYDFVENPDILRVYANLGERVRQSLLKTVQFCDAMRDAGIVGVLTLDNQDLNGNWYDFGDFVQVAPGCGVPIVDSYYSLLMPILTLTRALAAESHMDADLAKPLIKWDLLKYDFTEERLCLFDRYFKYWDQTYHPNCINCLDDRCILHCANFNVLFSTVFPPTSFGPLVRKIFVDGVPFVVSTGYHFRELGVVHNQDVNLHSSRLSFKELLVYAADPAMHAASGNLLLDKRTTCFSVAALTNNVAFQTVKPGNFNKDFYDFAVSKGFFKEGSSVELKHFFFAQDGNAAISDYDYYRYNLPTMCDIRQLLFVVEVVDKYFDCYDGGCINANQVIVNNLDKSAGFPFNKWGKARLYYDSMSYEDQDALFAYTKRNVIPTITQMNLKYAISAKNRARTVAGVSICSTMTNRQFHQKLLKSIAATRGATVVIGTSKFYGGWHNMLKTVYSDVETPHLMGWDYPKCDRAMPNMLRIMASLVLARKHNTCCNLSHRFYRLANECAQVLSEMVMCGGSLYVKPGGTSSGDATTAYANSVFNICQAVTANVNALLSTDGNKIADKYVRNLQHRLYECLYRNRDVDHEFVDEFYAYLRKHFSMMILSDDAVVCYNSNYAAQGLVASIKNFKAVLYYQNNVFMSEAKCWTETDLTKGPHEFCSQHTMLVKQGDDYVYLPYPDPSRILGAGCFVDDIVKTDGTLMIERFVSLAIDAYPLTKHPNQEYADVFHLYLQYIRKLHDELTGHMLDMYSVMLTNDNTSRYWEPEFYEAMYTPHTVLQAVGACVLCNSQTSLRCGACIRRPFLCCKCCYDHVISTSHKLVLSVNPYVCNAPGCDVTDVTQLYLGGMSYYCKSHKPPISFPLCANGQVFGLYKNTCVGSDNVTDFNAIATCDWTNAGDYILANTCTERLKLFAAETLKATEETFKLSYGIATVREVLSDRELHLSWEVGKPRPPLNRNYVFTGYRVTKNSKVQIGEYTFEKGDYGDAVVYRGTTTYKLNVGDYFVLTSHTVMPLSAPTLVPQEHYVRITGLYPTLNISDEFSSNVANYQKVGMQKYSTLQGPPGTGKSHFAIGLALYYPSARIVYTACSHAAVDALCEKALKYLPIDKCSRIIPARARVECFDKFKVNSTLEQYVFCTVNALPETTADIVVFDEISMATNYDLSVVNARLRAKHYVYIGDPAQLPAPRTLLTKGTLEPEYFNSVCRLMKTIGPDMFLGTCRRCPAEIVDTVSALVYDNKLKAHKDKSAQCFKMFYKGVITHDVSSAINRPQIGVVREFLTRNPAWRKAVFISPYNSQNAVASKILGLPTQTVDSSQGSEYDYVIFTQTTETAHSCNVNRFNVAITRAKIGILCIMSDRDLYDKLQFTSLEIPRRNVATLQAENVTGLFKDCSKIITGLHPTQAPTHLSVDIKFKTEGLCVDIPGIPKDMTYRRLISMMGFKMNYQVNGYPNMFITREEAIRHVRAWIGFDVEGCHATRDAVGTNLPLQLGFSTGVNLVAVPTGYVDTENNTEFTRVNAKPPPGDQFKHLIPLMYKGLPWNVVRIKIVQMLSDTLKGLSDRVVFVLWAHGFELTSMKYFVKIGPERTCCLCDKRATCFSTSSDTYACWNHSVGFDYVYNPFMIDVQQWGFTGNLQSNHDQHCQVHGNAHVASCDAIMTRCLAVHECFVKRVDWSVEYPIIGDELRVNSACRKVQHMVVKSALLADKFPVLHDIGNPKAIKCVPQAEVEWKFYDAQPCSDKAYKIEELFYSYATHHDKFTDGVCLFWNCNVDRYPANAIVCRFDTRVLSNLNLPGCDGGSLYVNKHAFHTPAFDKSAFTNLKQLPFFYYSDSPCESHGKQVVSDIDYVPLKSATCITRCNLGGAVCRHHANEYRQYLDAYNMMISAGFSLWIYKQFDTYNLWNTFTRLQSLENVAYNVVNKGHFDGHAGEAPVSIINNAVYTKVDGIDVEIFENKTTLPVNVAFELWAKRNIKPVPEIKILNNLGVDIAANTVIWDYKREAPAHVSTIGVCTMTDIAKKPTESACSSLTVLFDGRVEGQVDLFRNARNGVLITEGSVKGLTPSKGPAQASVNGVTLIGESVKTQFNYFKKVDGIIQQLPETYFTQSRDLEDFKPRSQMETDFLELAMDEFIQRYKLEGYAFEHIVYGDFSHGQLGGLHLMIGLAKRSQDSPLKLEDFIPMDSTVKNYFITDAQTGSSKCVCSVIDLLLDDFVEIIKSQDLSVISKVVKVTIDYAEISFMLWCKDGHVETFYPKLQASRAWQPGVAMPNLYKMQRMLLEKCDLQNYGENAVIPKGIMMNVAKYTQLCQYLNTLTLAVPYNMRVIHFGAGSDKGVAPGTAVLRQWLPTGTLLVDSDLNDFVSDAYSTLIGDCATVHTANKWDLIISDMYDPRTKHVTKENDSKEGFFTYLCGFIKQKLALGGSIAVKITEHSWNADLYKLMGHFSWWTAFVTNVNASSSEAFLIGANYLGKPKEQIDGYTMHANYIFWRNTNPIQLSSYSLFDMSKFPLKLRGTAVMSLKENQINDMIYSLLEKGRLIIRENNRVVVSSDILVNN

SEQ ID NO: 7117 - protein, 1257 aa, SARS coronavirus
TNMFIFLLFLTLTSGSDLDRCTTFDDVQAPNYTQHTSSMRGVYYPDEIFRSDTLYLTQDLFLPFYSNVTGFHTINHTFGNPVIPFKDGIYFAATEKSNVVRGWVFGSTMNNKSQSVIIINNSTNVVIRACNFELCDNPFFAVSKPMGTQTHTMIFDNAFNCTFEYISDAFSLDVSEKSGNFKHLREFVFKNKDGFLYVYKGYQPIDVVRDLPSGFNTLKPIFKLPLGINITNFRAILTAFSPAQDIWGTSAAAYFVGYLKPTTFMLKYDENGTITDAVDCSQNPLAELKCSVKSFEIDKGIYQTSNFRVVPSGDVVRFPNITNLCPFGEVFNATKFPSVYAWERKKISNCVADYSVLYNSTFFSTFKCYGVSATKLNDLCFSNVYADSFVVKGDDVRQIAPGQTGVIADYNYKLPDDFMGCVLAWNTRNIDATSTGNYNYKYRYLRHGKLRPFERDISNVPFSPDGKPCTPPALNCYWPLNDYGFYTTTGIGYQPYRVVVLSFELLNAPATVCGPKLSTDLIKNQCVNFNFNGLTGTGVLTPSSKRFQPFQQFGRDVSDFTDSVRDPKTSEILDISPCAFGGVSVITPGTNASSEVAVLYQDVNCTDVSTAIHADQLTPAWRIYSTGNNVFQTQAGCLIGAEHVDTSYECDIPIGAGICASYHTVSLLRSTSQKSIVAYTMSLGADSSIAYSNNTIAIPTNFSISITTEVMPVSMAKTSVDCNMYICGDSTECANLLLQYGSFCTQLNRALSGIAAEQDRNTREVFAQVKQMYKTPTLKYFGGFNFSQILPDPLKPTKRSFIEDLLFNKVTLADAGFMKQYGECLGDINARDLICAQKFNGLTVLPPLLTDDMIAAYTAALVSGTATAGWTFGAGAALQIPFAMQMAYRFNGIGVTQNVLYENQKQIANQFNKAISQIQESLTTTSTALGKLQDVVNQNAQALNTLVKQLSSNFGAISSVLNDILSRLDKVEAEVQIDRLITGRLQSLQTYVTQQLIRAAEIRASANLAATKMSECVLGQSKRVDFCGKGYHLMSFPQAAPHGVVFLHVTYVPSQERNFTTAPAICHEGKAYFPREGVFVFNGTSWFITQRNFFSPQIITTDNTFVSGNCDVVIGIINNTVYDPLQPELDSFKEELDKYFKNHTSPDVDLGDISGINASVVNIQKEIDRLNEVAKNLNESLIDLQELGKYEQYIKWPWYVWLGFIAGLIAIVMVTILLCCMTSCCSCLKGACSCGSCCKFDEDDSEPVLKGVKLHYT

SEQ ID NO: 7118 - protein, 7 aa, SARS coronavirus
TNLWICL

SEQ ID NO: 7119 - protein, 12 aa, SARS coronavirus
DFLLLDQLLHSQ

SEQ ID NO: 7120 - protein, 43 aa, SARS coronavirus
KLTMLLLQVLFMLQQRYRYKPHSLSDGLLLALHFLLFFRALPK

SEQ ID NO: 7121 - protein, 8 aa, SARS coronavirus
LRSIKDGS

SEQ ID NO: 7122 - protein, 39 aa, SARS coronavirus
PFIRASSSFAIYCCYLLPSIHIFCLSLQVWRRNFCTSMP

SEQ ID NO: 7123 - protein, 13 aa, SARS coronavirus
YIFYNASTHVELL

SEQ ID NO: 7124 - protein, 169 aa, SARS coronavirus
DVGFVGSANPRTHYFMMPTTLFAGTHITMTTVYHITVSQIQLSLLKVTAFQHQNSKKTTKLVVILRIGTQVLKTMSLYMAISPKFTTSLSLHKLLQTLVLKMLHSSSLTSLLKTHRMCKYTQSTALQELLIQQWIQFMMSRRRLLACLCKHKKVSTNLCTHSFRKKQVR

SEQ ID NO: 7125 - protein, 14 aa, SARS coronavirus
LIAYFFFLLSWYSC

SEQ ID NO: 7126 - protein, 17 aa, SARS coronavirus
PSLLRFDCVRTAAILLT

SEQ ID NO: 7127 - protein, 12 aa, SARS coronavirus
NQRFTSTRVLKI

SEQ ID NO: 7128 - protein, 37 aa, SARS coronavirus
TLLKEFLIFWSKRTNYYYYSVWNFNIAYHGRQRYYYR

SEQ ID NO: 7129 - protein, 26 aa, SARS coronavirus
TTPGTMEPSNRFPIPSLDYVTTICLF

SEQ ID NO: 7130 - protein, 32 aa, SARS coronavirus
SEQVFVHNKACFPLALVASNTCLFCACCCLQN

SEQ ID NO: 7131 - protein, 19 aa, SARS coronavirus
LGDWRDCDCNGLYCRLDVA

SEQ ID NO: 7132 - protein, 42 aa, SARS coronavirus
LLRCFLQAVCSYPLNVVIQPRNKHSSQCASPGDNCDQTAHGK

SEQ ID NO: 7133 - protein, 22 aa, SARS coronavirus
TCHWCCDHSWSLANGRTLPRAL

SEQ ID NO: 7134 - protein, 27 aa, SARS coronavirus
GPAKRDHCGYITNAFLLQIRSVAACRH

SEQ ID NO: 7135 - protein, 14 aa, SARS coronavirus
FRFCCIQPLPYWKL

SEQ ID NO: 7136 - protein, 7 aa, SARS coronavirus
IKYRPRR

SEQ ID NO: 7137 - protein, 24 aa, SARS coronavirus
QRQYCFASTVSDNRCFILLTSRLQ

SEQ ID NO: 7138 - protein, 12 aa, SARS coronavirus
GLSGLLFGILTL

SEQ ID NO: 7139 - protein, 6 aa, SARS coronavirus
DNYLSL

SEQ ID NO: 7140 - protein, 7 aa, SARS coronavirus
LRRIIRS

SEQ ID NO: 7141 - protein, 7 aa, SARS coronavirus
MMKNLWS

SEQ ID NO: 7142 - protein, 128 aa, SARS coronavirus
IIHKTNMKIILFLTLIVFTSCELYHYQECVRGTTVLLKEPCPSGTYEGNSPFHPLADNKFALTCTSTHFAFACADGTRHTYQLRARSVSPKLFIRQEEVQQELYSPLFLIVAALVFLILCFTIKRKTE

SEQ ID NO: 7143 - protein, 4 aa, SARS coronavirus
MSSL

SEQ ID NO: 7144 - protein, 7 aa, SARS coronavirus
LTSICAF

SEQ ID NO: 7145 - protein, 7 aa, SARS coronavirus
PFCYSLF

SEQ ID NO: 7146 - protein, 13 aa, SARS coronavirus
CLLYFGFHSKSRI

SEQ ID NO: 7147 - protein, 10 aa, SARS coronavirus
KNLVPKSKRT

SEQ ID NO: 7148 - protein, 5 aa, SARS coronavirus
NFSLF

SEQ ID NO: 7149 - protein, 11 aa, SARS coronavirus
LVFLYAVAYAL

SEQ ID NO: 7150 - protein, 93 aa, SARS coronavirus
YSAVHLINLMCLKILVRYNTRGNTYSTAWLCALGKVLPFHRWHTMVQTCTPNVTINCQDPAGGALIARCWYLHEGHQTAAFRDVLVVLNKRTN

SEQ ID NO: 7151 - protein, 7 aa, SARS coronavirus
WTPIKPT

SEQ ID NO: 7152 - protein, 13 aa, SARS coronavirus
CPPHYIWWTHRFN

SEQ ID NO: 7153 - protein, 20 aa, SARS coronavirus
PEWRTQWGKAKTAPTPRFTQ

SEQ ID NO: 7154 - protein, 16 aa, SARS coronavirus
YCVLVHSSHSAWQGGT

SEQ ID NO: 7155 - protein, 12 aa, SARS coronavirus
IPSRPGRSNQHQ

SEQ ID NO: 7156 - protein, 15 aa, SARS coronavirus
PNWLLPKSYPTSSWW

SEQ ID NO: 7157 - protein, 27 aa, SARS coronavirus
RQNERAQPQMVLLLPRNWPRSFTSLRR

SEQ ID NO: 7158 - protein, 9 aa, SARS coronavirus
QRRHRMGCN

SEQ ID NO: 7159 - protein, 15 aa, SARS coronavirus
GSLEYTQRPHWHPQS

SEQ ID NO: 7160 - protein, 36 aa, SARS coronavirus
QCCHRATTSSRNNIAKRLLRRGKQRRQSSLFSLLIT

SEQ ID NO: 7161 - protein, 9 aa, SARS coronavirus
FKKFNSWQQ

SEQ ID NO: 7162 - protein, 8 aa, SARS coronavirus
GKFSCSNG

SEQ ID NO: 7163 - protein, 14 aa, SARS coronavirus
NCPRAIAARQIEPA

SEQ ID NO: 7164 - protein, 5 aa, SARS coronavirus
EQSFW

SEQ ID NO: 7165 - protein, 10 aa, SARS coronavirus
RPTTTRPNCH

SEQ ID NO: 7166 - protein, 4 aa, SARS coronavirus
EICC

SEQ ID NO: 7167 - protein, 40 aa, SARS coronavirus
KASPKTYCHKTVQRHSSIWETWSRTNPRKFRGPRPNQTRN

SEQ ID NO: 7168 - protein, 40 aa, SARS coronavirus
LQTLAANCTICSKCLCILWNVTHWHGSHTFGNMADLSWSH

SEQ ID NO: 7169 - protein, 16 aa, SARS coronavirus
QRSTIQRQRHTAEQAH

SEQ ID NO: 7170 - protein, 10 aa, SARS coronavirus
RIQNIPTNRA

SEQ ID NO: 7171 - protein, 7 aa, SARS coronavirus
KGQKEKD

SEQ ID NO: 7172 - protein, 20 aa, SARS coronavirus
SSAFAAETKEAAHCDSSSCG

SEQ ID NO: 7173 - protein, 14 aa, SARS coronavirus
FLQTTSKFHEWSFC

SEQ ID NO: 7174 - protein, 39 aa, SARS coronavirus
FNSGINTHDDHTRQMGYVNVFAIPFTIHSLLLCRMNSRN

SEQ ID NO: 7175 - protein, 12 aa, SARS coronavirus
TAQVGLVNFNLT

SEQ ID NO: 7176 - protein, 6 aa, SARS coronavirus
QSLINV

SEQ ID NO: 7177 - protein, 21 aa, SARS coronavirus
GGLERATTFSSRPRGVRSRVQ

SEQ ID NO: 7178 - protein, 12 aa, SARS coronavirus
IMLGRAAYMEEP

SEQ ID NO: 7179 - protein, 18 aa, SARS coronavirus
CVKLILVVLSPCDFNSFL

SEQ ID NO: 7180 - protein, 4 aa, SARS coronavirus
NGTC

SEQ ID NO: 7181 - protein, 4 aa, SARS coronavirus
NHSN

SEQ ID NO: 7182 - protein, 4 aa, SARS coronavirus
NFSS

SEQ ID NO: 7183 - protein, 4 aa, SARS coronavirus
NHTK

SEQ ID NO: 7184 - protein, 4 aa, SARS coronavirus
NKTV

SEQ ID NO: 7185 - protein, 4 aa, SARS coronavirus
NSSN

SEQ ID NO: 7186 - protein, 4 aa, SARS coronavirus
NVSL

SEQ ID NO: 7187 - protein, 4 aa, SARS coronavirus
NATE

SEQ ID NO: 7188 - protein, 2712 aa, SARS coronavirus; identical to SEQ ID NO: 7116

SEQ ID NO: 7189 - protein, 1257 aa, SARS coronavirus; identical to SEQ ID NO: 7117

SEQ ID NO: 7190 - protein, 1125 aa, SARS coronavirus
KDMTYRRLISMMGFKMNYQVNGYPNMFITREEAIRHVRAWIGFDVEGCHATRDAVGTNLPLQLGFSTGVNLVAVPTGYVDTENNTEFTRVNAKPPPGDQFKHLIPLMYKGLPWNVVRIKIVQMLSDTLKGLSDRVVFVLWAHGFELTSMKYFVKIGPERTCCLCDKRATCFSTSSDTYACWNHSVGFDYVYNPFMIDVQQWGFTGNLQSNHDQHCQVHGNAHVASCDAIMTRCLAVHECFVKRVDWSVEYPIIGDELRVNSACRKVQHMVVKSALLADKFPVLHDIGNPKAIKCVPQAEVEWKFYDAQPCSDKAYKIEELFYSYAIHHDKFTDGVCLFWNCNVDRYPANAIVCRFDTRVLSNLNLPGCDGGSLYVNKHAFHTPAFDKSAFTNLKQLPFFYYSDSPCESHGKQVVSDIDYVPLKSATCITRCNLGGAVCRHHANEYRQYLDAYNMMISAGFSLWIYKQFDTYNLWNTFTRLQSLENVAYNVVNKGHFDGHAGEAPVSIINNAVYTKVDGIDVEIFENKTTLPVNVAFELWAKRNIKPVPEIKILNNLGVDIAANTVIWDYKREAPAHVSTIGVCTMTDIAKKPTESACSSLTVLFDGRVEGQVDLFRNARNGVLITEGSVKGLTPSKGPAQASVNGVTLIGESVKTQFNYFKKVDGIIQQLPETYFTQSRDLEDFKPRSQMETDFLELAMDEFIQRYKLEGYAFEHIVYGDFSHGQLGGLHLMIGLAKRSQDSPLKLEDFIPMDSTVKNYFITDAQTGSSKCVCSVIDLLLDDFVEIIKSQDLSVISKVVKVTIDYAEISFMLWCKDGHVETFYPKLQASQAWQPGVAMPNLYKMQRMLLEKCDLQNYGENAVIPKGIMMNVAKYTQLCQYLNTLTLAVPYNMRVIHFGAGSDKGVAPGTAVLRQWLPTGTLLVDSDLNDFVSDADSTLIGDCATVHTANKWDLIISDMYDPRTKHVTKENDSKEGFFTYLCGFIKQKLALGGSIAVKITEHSWNADLYKLMGHFSWWTAFVTNVNASSSEAFLIGANYLGKPKEQIDGYTMHANYIFWRNTNPIQLSSYSLFDMSKFPLKLRGTAVMSLKENQINDMIYSLLEKGRLIIRENNRVVVSSDILVNN

SEQ ID NO: 7191 - DNA, 3378 bp, SARS coronavirus
aaggacatgacctaccgtagactcatctctatgatgggtttcaaaatgaattaccaagtcaatggttaccctaatatgtttatcacccgcgaagaagctattcgtcacgttcgtgcgtggattggctttgatgtagagggctgtcatgcaactagagatgctgtgggtactaacctacctctccagctaggattttctacaggtgttaacttagtagctgtaccgactggttatgttgacactgaaaataacacagaattcaccagagttaatgcaaaacctccaccaggtgaccagtttaaacatcttataccactcatgtataaaggcttgccctggaatgtagtgcgtattaagatagtacaaatgctcagtgatacactgaaaggattgtcagacagagtcgtgttcgtcctttgggcgcatggctttgagcttacatcaatgaagtactttgtcaagattggacctgaaagaacgtgttgtctgtgtgacaaacgtgcaacttgcttttctacttcatcagatacttatgcctgctggaatcattctgtgggttttgactatgtctataacccatttatgattgatgttcagcagtggggctttacgggtaaccttcagagtaaccatgaccaacattgccaggtacatggaaatgcacatgtggctagttgtgatgctatcatgactagatgtttagcagtccatgagtgctttgttaagcgcgttgattggtctgttgaataccctattataggagatgaactgagggttaattctgcttgcagaaaagtacaacacatggttgtgaagtctgcattgcttgctgataagtttccagttcttcatgacataggaaatccaaaggctatcaagtgtgtgcctcaggctgaagtagaatggaagttctacgatgctcagccatgtagtgacaaagcttacaaaatagaggaactcttctattcttatgctatacatcacgataaattcactgatggtgtttgtttgttttggaattgtaacgttgatcgttacccagccaatgcaattgtgtgtaggtttgacacaagagtcttgtcaaacttgaacttaccaggctgtgatggtggtagtttgtatgtgaataagcatgcattccacactccagctttcgataaaagtgcatttactaatttaaagcaattgcctttcttttactattctgatagtccttgtgagtctcatggcaaacaagtagtgtcggatattgattatgttccactcaaatctgctacgtgtattacacgatgcaatttaggtggtgctgtttgcagacaccatgcaaatgagtaccgacagtacttggatgcatataatatgatgatttctgctggatttagcctatggatttacaaacaatttgatacttataacctgtggaatacatttaccaggttacagagtttagaaaatgtggcttataatgttgttaataaaggacactttgatggacacgccggcgaagcacctgtttccatcattaataatgctgtttacacaaaggtagatggtattgatgtggagatctttgaaaataagacaacacttcctgttaatgttgcatttgagctttgggctaagcgtaacattaaaccagtgccagagattaagatactcaataatttgggtgttgatatcgctgctaatactgtaatctgggactacaaaagagaagccccagcacatgtatctacaataggtgtctgcacaatgactgacattgccaagaaacctactgagagtgcttgttcttcacttactgtcttgtttgatggtagagtggaaggacaggtagacctttttagaaacgcccgtaatggtgttttaataacagaaggttcagtcaaaggtctaacaccttcaaagggaccagcacaagctagcgtcaatggagtcacattaattggagaatcagtaaaaacacagtttaactactttaagaaagtagacggcattattcaacagttgcctgaaacctactttactcagagcagagacttagaggattttaagcccagatcacaaatggaaactgactttctcgagctcgctatggatgaattcatacagcgatataagctcgagggctatgccttcgaacacatcgtttatggagatttcagtcatggacaacttggcggtcttcatttaatgataggcttagccaagcgctcacaagattcaccacttaaattagaggattttatccctatggacagcacagtgaaaaattacttcataacagatgcgcaaacaggttcatcaaaatgtgtgtgttctgtgattgatcttttacttgatgactttgtcgagataataaagtcacaagatttgtcagtgatttcaaaagtggtcaaggttacaattgactatgctgaaatttcattcatgctttggtgtaaggatggacatgttgaaaccttctacccaaaactacaagcaagtcaagcgtggcaaccaggtgttgcgatgcctaacttgtacaagatgcaaagaatgcttcttgaaaagtgtgaccttcagaattatggtgaaaatgctgttataccaaaaggaataatgatgaatgtcgcaaagtatactcaactgtgtcaatacttaaatacacttactttagctgtaccctacaacatgagagttattcactttggtgctggctctgataaaggagttgcaccaggtacagctgtgctcagacaatggttgccaactggcacactacttgtcgattcagatcttaatgacttcgtctccgacgcagattctactttaattggagactgtgcaacagtacatacggctaataaatgggaccttattattagcgatatgtatgaccctaggaccaaacatgtgacaaaagagaatgactctaaagaagggtttttcacttatctgtgtggatttataaagcaaaaactagccctgggtggttctatagctgtaaagataacagagcattcttggaatgctgacctttacaagcttatgggccatttctcatggtggacagcttttgttacaaatgtaaatgcatcatcatcggaagcatttttaattggggctaactatcttggcaagccgaaggaacaaattgatggctataccatgcatgctaactacattttctggaggaacacaaatcctatccagttgtcttcctattcactctttgacatgagcaaatttcctcttaaattaagaggaactgctgtaatgtctcttaaggagaatcaaatcaatgatatgatttattctcttctggaaaaaggtaggcttatcattagagaaaacaacagagttgtggtttcaagtgatattcttgttaacaactaa

SEQ ID NO: 7192 - protein, 127 aa, SARS coronavirus
PFAMQMAYRFNGIGVTQNVLYENQKQIANQFNKAISQIQESLTTTSTALGKLQDVVNQNAQALNTLVKQLSSNFGAISSVLNDILSRLDKVEAEVQIDRLITGRLQSLQTYVTQQLIRAAEIRASAN

SEQ ID NO: 7193 - protein, 102 aa, SARS coronavirus
PFAMQMAYRFNGIGVTQNVLYENQKQIANQFNKAISQIQESLTTTSTALGKLQDVVNQNAQALNTLVKQLSSNFGAISSVLNDILSRLDKVEAEVQIDRLIT

SEQ ID NO: 7194 - protein, 105 aa, SARS coronavirus
NQKQIANQFNKAISQIQESLTTTSTALGKLQDVVNQNAQALNTLVKQLSSNFGAISSVLNDILSRLDKVEAEVQIDRLITGRLQSLQTYVTQQLIRAAEIRASAN

SEQ ID NO: 7195 - protein, 58 aa, SARS coronavirus
PDVDLGDISGINASVVNIQKEIDRLNEVAKNLNESLIDLQELGKYEQYIKWPWYVWLG

SEQ ID NO: 7196 - protein, 52 aa, SARS coronavirus
PDVDLGDISGINASVVNIQKEIDRLNEVAKNLNESLIDLQELGKYEQYIKWP

SEQ ID NO: 7197 - protein, 19 aa, SARS coronavirus
KQIANQFNKAISQIQESLT

SEQ ID NO: 7198 - protein, 17 aa, SARS coronavirus
HLMSFPQAAPHGVVFLH

SEQ ID NO: 7199 - protein, 20 aa, SARS coronavirus
AALVSGTATAGWTFGAGAAL

SEQ ID NO: 7200 - protein, 513 aa, Artificial Sequence
  Fusion polypeptide (SARS coronavirus & Neisseria meningitidis)
MKHFPSKVLTTAILATFCSGALAATNDDDPFAMQMAYRFNGIGVTQNVLYENQKQIANQFNKAISQIQESLTTTSTALGKLQDVVNQNAQALNTLVKQLSSNFGAISSVLNDILSRLDKVEAEVQIDRLITGGGGGGPDVDFGDISGINASVVNIQKEIDRLNEVAKNLNESLIDLQELGKYEQYIKWPGGGGSGKVVTNLTKTVNENKQNVDAKVKAAESEIEKLTTKLADTDAALADTDAALDATTNALNKLGENITTFAEETKTNIVKIDEKLEAVADTVDKHAEAFNDIADSLDETNTKADEAVKTANEAKQTAEETKQNVDAKVKAAETAAGKAEAAAGTANTAADKAEAVAAKVTDIKADIATNKDNIAKKANSADVYTREESDSKFVRIDGLNATTEKLDTRLASAEKSIADHDTRLNGLDKTVSDLRKETRQGLAEQAALSGLFQPYNVGRFNVTAAVGGYKSESAVAIGTGFRFTENFAAKAGVAVGTSSGSSAAYHVGVNYEW

SEQ ID NO: 7201 - protein, 458 aa, Artificial Sequence
  Fusion polypeptide (SARS coronavirus & Neisseria meningitidis)
MKHFPSKVLTTAILATFCSGALAATNDDDPFAMQMAYRFNGIGVTQNVLYENQKQIANQFNKAISQIQESLTTTSTALGKLQDVVNQNAQALNTLVKQLSSNFGAISSVLNDILSRLDKVEAEVQIDRLITGGGGGGPDVDFGDISGINASVVNIQKEIDRLNEVAKNLNESLIDLQELGKYEQYIKWPGGGGSGKVVTNLTKTVNENKQNVDAKVKAAESEIEKLTTKLADTDAALADTDAALDATTNALNKLGENITTFAEETKTNIVKIDEKLEAVADTVDKHAEAFNDIADSLDETNTKADEAVKTANEAKQTAEETKQNVDAKVKAAETAAGKAEAAAGTANTAADKAEAVAAKVTDIKADIATNKDNIAKKANSADVYTREESDSKFVRIDGLNATTEKLDTRLASAEKSIADHDTRLNGLDKTVSDLRKETRQGLAEQAALSGLFQPYNVG

SEQ ID NO: 7202 - protein, 670 aa, Artificial Sequence
  Fusion polypeptide (SARS coronavirus & Neisseria meningitidis)
MKHFPSKVLTTAILATFCSGALAATNDDDPFAMQMAYRFNGIGVTQNVLYENQKQIANQFNKAISQIQESLTTTSTALGKLQDVVNQNAQALNTLVKQLSSNFGAISSVLNDILSRLDKVEAEVQIDRLITGRLQSLQTYVTQQLIRAAEIRASANLAATKMSECVLGQSKRVDFCGKGYHLMSFPQAAPHGVVFLHVTYVPSQERNFTTAPAICHEGKAYFPREGVFVFNGTSWFITQRNFFSPQIITTDNTFVSGNCDVVIGIINNTVYDPLQPELDSFKEELDKYFKNHTSPDVDFGDISGINASVVNIQKEIDRLNEVAKNLNESLIDLQELGKYEQYIKWPGGGGSGKVVTNLTKTVNENKQNVDAKVKAAESEIEKLTTKLADTDAALADTDAALDATTNALNKLGENITTFAEETKTNIVKIDEKLEAVADTVDKHAEAFNDIADSLDETNTKADEAVKTANEAKQTAEETKQNVDAKVKAAETAAGKAEAAAGTANTAADKAEAVAAKVTDIKADIATNKDNIAKKANSADVYTREESDSKFVRIDGLNATTEKLDTRLASAEKSIADHDTRLNGLDKTVSDLRKETRQGLAEQAALSGLFQPYNVGRFNVTAAVGGYKSESAVAIGTGFRFTENFAAKAGVAVGTSSGSSAAYHVGVNYEW

SEQ ID NO: 7203 - protein, 615 aa, Artificial Sequence
  Fusion polypeptide (SARS coronavirus & Neisseria meningitidis)
MKHFPSKVLTTAILATFCSGALAATNDDDPFAMQMAYRFNGIGVTQNVLYENQKQIANQFNKAISQIQESLTTTSTALGKLQDVVNQNAQALNTLVKQLSSNFGAISSVLNDILSRLDKVEAEVQIDRLITGRLQSLQTYVTQQLIRAAEIRASANLAATKMSECVLGQSKRVDFCGKGYHLMSFPQAAPHGVVFLHVTYVPSQERNFTTAPAICHEGKAYFPREGVFVFNGTSWFITQRNFFSPQIITTDNTFVSGNCDVVIGIINNTVYDPLQPELDSFKEELDKYFKNHTSPDVDFGDISGINASVVNIQKEIDRLNEVAKNLNESLIDLQELGKYEQYIKWPGGGGSGKVVTNLTKTVNENKQNVDAKVKAAESEIEKLTTKLADTDAALADTDAALDATTNALNKLGENITTFAEETKTNIVKIDEKLEAVADTVDKHAEAFNDIADSLDETNTKADEAVKTANEAKQTAEETKQNVDAKVKAAETAAGKAEAAAGTANTAADKAEAVAAKVTDIKADIATNKDNIAKKANSADVYTREESDSKFVRIDGLNATTEKLDTRLASAEKSIADHDTRLNGLDKTVSDLRKETRQGLAEQAALSGLFQPYNVG

SEQ ID NO: 7204 - protein, 592 aa, Artificial Sequence
  Fusion polypeptide (SARS coronavirus & Neisseria meningitidis)
PFAMQMAYRFNGIGVTQNVLYENQKQIANQFNKAISQIQESLTTTSTALGKLQDVVNQNAQALNTLVKQLSSNFGAISSVLNDILSRLDKVEAEVQIDRLITGRLQSLQTYVTQQLIRAAEIRASANLAATKMSECVLGQSKRVDFCGKGYHLMSFPQAAPHGVVFLHVTYVPSQERNFTTAPAICHEGKAYFPREGVFVFNGTSWFITQRNFFSPQIITTDNTFVSGNCDVVIGIINNTVYDPLQPELDSFKEELDKYFKNHTSPDVDFGDISGINASVVNIQKEIDRLNEVAKNLNESLIDLQELGKYEQYIKWPGGGGSGKVVTNLTKTVNENKQNVDAKVKAAESEIEKLTTKLADTDAALADTDAALDATTNALNKLGENITTFAEETKTNIVKIDEKLEAVADTVDKHAEAFNDIADSLDETNTKADEAVKTANEAKQTAEETKQNVDAKVKAAETAAGKAEAAAGTANTAADKAEAVAAKVTDIKADIATNKDNIAKKANSADVYTREESDSKFVRIDGLNATTEKLDTRLASAEKSIADHDTRLNGLDKTVSDLRKETRQGLAEQAALSGLFQPYNVGHHHHHH

SEQ ID NO: 7205 - protein, 401 aa, Artificial Sequence
  Fusion polypeptide (SARS coronavirus & Neisseria meningitidis)
MKHFPSKVLTTAILATFCSGALAATNDDDPFAMQMAYRFNGIGVTQNVLYENQKQIANQFNKAISQIQESLTTTSTALGKLQDVVNQNAQALNTLVKQLSSNFGAISSVLNDILSRLDKVEAEVQIDRLITGRLQSLQTYVTQQLIRAAEIRASANLAATKMSECVLGQSKRVDFCGKGYHLMSFPQAAPHGVVFLHVTYVPSQERNFTTAPAICHEGKAYFPREGVFVFNGTSWFITQRNFFSPQIITTDNTFVSGNCDVVIGIINNTVYDPLQPELDSFKEELDKYFKNHTSPDVDFGDISGINASVVNIQKEIDRLNEVAKNLNESLIDLQELGKYEQYIKWPRFNVTAAVGGYKSESAVAIGTGFRFTENFAAKAGVAVGTSSGSSAAYHVGVNYEW

SEQ ID NO: 7206 - protein, 346 aa, Artificial Sequence
  Fusion polypeptide (SARS coronavirus & Neisseria meningitidis)
MKHFPSKVLTTAILATFCSGALAATNDDDPFAMQMAYRFNGIGVTQNVLYENQKQIANQFNKAISQIQESLTTTSTALGKLQDVVNQNAQALNTLVKQLSSNFGAISSVLNDILSRLDKVEAEVQIDRLITGRLQSLQTYVTQQLIRAAEIRASANLAATKMSECVLGQSKRVDFCGKGYHLMSFPQAAPHGVVFLHVTYVPSQERNFTTAPAICHEGKAYFPREGVFVFNGTSWFITQRNFFSPQIITTDNTFVSGNCDVVIGIINNTVYDPLQPELDSFKEELDKYFKNHTSPDVDFGDISGINASVVNIQKEIDRLNEVAKNLNESLIDLQELGKYEQYIKWP

SEQ ID NO: 7207 - protein, 4 aa, SARS coronavirus
NYTQ

SEQ ID NO: 7208 - protein, 4 aa, SARS coronavirus
NVTG

SEQ ID NO: 7209 - protein, 4 aa, SARS coronavirus
NKSQ

SEQ ID NO: 7210 - protein, 4 aa, SARS coronavirus
NSTN

SEQ ID NO: 7211 - protein, 4 aa, SARS coronavirus
NCTF

SEQ ID NO: 7212 - protein, 4 aa, SARS coronavirus
NITN

SEQ ID NO: 7213 - protein, 4 aa, SARS coronavirus
NGTI

SEQ ID NO: 7214 - protein, 4 aa, SARS coronavirus
NITN

SEQ ID NO: 7215 - protein, 4 aa, SARS coronavirus
NATK

SEQ ID NO: 7216 - protein, 4 aa, SARS coronavirus
NSTF

SEQ ID NO: 7217 - protein, 4 aa, SARS coronavirus
NASS

SEQ ID NO: 7218 - protein, 4 aa, SARS coronavirus
NCTD

SEQ ID NO: 7219 - protein, 4 aa, SARS coronavirus
NFSI

SEQ ID NO: 7220 - protein, 4 aa, SARS coronavirus
NFSQ

SEQ ID NO: 7221 - protein, 4 aa, SARS coronavirus
NGTS

SEQ ID NO: 7222 - protein, 4 aa, SARS coronavirus
NNTV

SEQ ID NO: 7223 - protein, 4 aa, SARS coronavirus
NESL

SEQ ID NO: 7224 - DNA, 178 bp, SARS coronavirus
gggttttacacttagaaacacagtctgtaccgtctgcggaatgtggaaaggttatggctgtagttgtgaccaactccgcgaacccttgatgcagtctgcggatgcatcaacgtttttaaacgggtttgcggtgtaagtgcagcccgtcttacaccgtgcggcacaggcactagtactg

SEQ ID NO: 7225 - protein, 44 aa, SARS coronavirus
GFTLRNTVCTVCGMWKGYGCSCDQLREPLMQSADASTFLNGFAV

SEQ ID NO: 7226 - protein, 14 aa, SARS coronavirus
VQPVLHRAAQALVL

SEQ ID NO: 7227 - protein, 4 aa, SARS coronavirus
GFYT

SEQ ID NO: 7228 - protein, 15 aa, SARS coronavirus
KHSLYRLRNVERLWL

SEQ ID NO: 7229 - protein, 36 aa, SARS coronavirus
PTPRTLDAVCGCINVFKRVCGVSAARLTPCGTGTST

SEQ ID NO: 7230 - DNA, 69 bp, SARS coronavirus
ccaactccgcgaacccttgatgcagtctgcggatgcatcaacgtttttaaacgggtttgcggtgtaagt

SEQ ID NO: 7231 - protein, 23 aa, SARS coronavirus
QLREPLMQSADASTFLNRVCGVS

SEQ ID NO: 7232 - protein, 7073 aa, SARS coronavirus
MESLVLGVNEKTHVQLSLPVLQVRDVLVRGFGDSVEEALSEAREHLKNGTCGLVELEKGVLPQLEQPYVFIKRSDALSTNHGHKVVELVAEMDGIQYGRSGITLGVLVPHVGETPIAYRNVLLRKNGNKGAGGHSYGIDLKSYDLGDELGTDPIEDYEQNWNTKHGSGALRELTRELNGGAVTRYVDNNFCGPDGYPLDCIKDFLARAGKSMCTLSEQLDYIESKRGVYCCRDHEHEIAWFTERSDKSYEHQTPFEIKSAKKFDTFKGECPKFVFPLNSKVKVIQPRVEKKKTEGFMGRIRSVYPVASPQECNNMHLSTLMKCNHCDEVSWQTCDFLKATCEHCGTENLVIEGPTTCGYLPTNAVVKMPCPACQDPEIGPEHSVADYHNHSNIETRLRKGGRTRCFGGCVFAYVGCYNKRAYWVPRASADIGSGHTGITGDNVETLNEDLLEILSRERVNINIVGDFHLNEEVAIILASFSASTSAFIDTIKSLDYKSFKTIVESCGNYKVTKGKPVKGAWNIGQQRSVLTPLCGFPSQAAGVIRSIFARTLDAANHSIPDLQRAAVTILDGISEQSLRLVDAMVYTSDLLTNSVIIMAYVTGGLVQQTSQWLSNLLGTTVEKLRPIFEWIEAKLSAGVEFLKDAWEILKFLITGVFDIVKGQIQVASDNIKDCVKCFIDVVNKALEMCIDQVTIAGAKLRSLNLGEVFIAQSKGLYRQCIRGKEQLQLLMPLKAPKEVTFLEGDSHDTVLTSEEVVLKNGELEALETPVDSFTNGAIVGTPVCVNGLMLLEIKDKEQYCALSPGLLATNNVFRLKGGAPIKGVTFGEDTVWEVQGYKNVRITFELDERVDKVLNEKCSVYTVESGTEVTEFACVVAEAVVKTLQPVSDLLTNMGIDLDEWSVATFYLFDDAGEENFSSRMYCSFYPPDEEEEDDAECEEEEIDETCEHEYGTEDDYQGLPLEFGASAETVRVEEEEEEDWLDDTTEQSEIEPEPEPTPEEPVNQFTGYLKLTDNVAIKCVDIVKEAQSANPMVIVNAANIHLKHGGGVAGALNKATNGAMQKESDDYIKLNGPLTVGGSCLLSGHNLAKKCLHVVGPNLNAGEDIQLLKAAYENFNSQDILLAPLLSAGIFGAKPLQSLQVCVQTVRTQVYIAVNDKALYEQVVMDYLDNLKPRVEAPKQEEPPNTEDSKTEEKSVVQKPVDVKPKIKACIDEVTTTLEETKFLTNKLLLFADINGKLYHDSQNMLRGEDMSFLEKDAPYMVGDVITSGDITCVVIPSKKAGGTTEMLSRALKKVPVDEYITTYPGQGCAGYTLEEAKTALKKCKSAFYVLPSEAPNAKEEILGTVSWNLREMLAHAEETRKLMPICMDVRAIMATIQRKYKGIKIQEGIVDYGVRFFFYTSKEPVASIITKLNSLNEPLVTMPIGYVTHGFNLEEAARCMRSLKAPAVVSVSSPDAVTTYNGYLTSSSKTSEEHFVETVSLAGSYRDWSYSGQRTELGVEFLKRGDKIVYHTLESPVEFHLDGEVLSLDKLKSLLSLREVKTIKVFTTVDNTNLHTQLVDMSMTYGQQFGPTYLDGADVTKIKPHVNHEGKTFFVLPSDDTLRSEAFEYYHTLDESFLGRYMSALNHTKKWKFPQVGGLTSIKWADNNCYLSSVLLALQQLEVKFNAPALQEAYYRARAGDAANFCALILAYSNKTVGELGDVRETMTHLLQHANLESAKRVLNVVCKHCGQKTTTLTGVEAVMYMGTLSYDNLKTGVSIPCVCGRDATQYLVQQESSFVMMSAPPAEYKLQQGTFLCANEYTGNYQCGHYTHITAKETLYRIDGAHLTKMSEYKGPVTDVFYKETSYTTTIKPVSYKLDGVTYTEIEPKLDGYYKKDNAYYTEQPIDLVPTQPLPNASFDNFKLTCSNTKFADDLNQMTGFTKPASRELSVTFFPDLNGDVVAIDYRHYSASFKKGAKLLHKPIVWHINQATTKTTFKPNTWCLRCLWSTKPVDTSNSFEVLAVEDTQGMDNLACESQQPTSEEVVENPTIQKEVIECDVKTTEVVGNVILKPSDEGVKVTQELGHEDLMAAYVENTSITIKKPNELSLALGLKTIATHGIAAINSVPWSKILAYVKPFLGQAAITTSNCAKRLAQRVFNNYMPYVFTLLFQLCTFTKSTNSRIRASLPTTIAKNSVKSVAKLCLDAGINYVKSPKFSKLFTIAMWLLLLSICLGSLICVTAAFGVLLSNFGAPSYCNGVRELYLNSSNVTTMDFCEGSFPCSICLSGLDSLDSYPALETIQVTISSYKLDLTILGLAAEWVLAYMLFTKFFYLLGLSAIMQVFFGYFASHFISNSWLMWFIISIVQMAPVSAMVRMYIFFASFYYIWKSYVHIMDGCTSSTCMMCYKRNRATRVECTTIVNGMKRSFYVYANGGRGFCKTHNWNCLNCDTFCTGSTFISDEVARDLSLQFKRPINPTDQSSYIVDSVAVKNGALHLYFDKAGQKTYERHPLSHFVNLDNLRANNTKGSLPINVIVFDGKSKCDESASKSASVYYSQLMCQPILLLDQALVSDVGDSTEVSVKMFDAYVDTFSATFSVPMEKLKALVATAHSELAKGVALDGVLSTFVSAARQGVVDTDVDTKDVIECLKLSHHSDLEVTGDSCNNFMLTYNKVENMTPRDLGACIDCNARHINAQVAKSHNVSLIWNVKDYMSLSEQLRKQIRSAAKKNNIPFRLTCATTRQVVNVITTKISLKGGKIVSTCFKLMLKATLLCVLAALVCYIVMPVHTLSIHDGYTNEIIGYKAIQDGVTRDIISTDDCFANKHAGFDAWFSQRGGSYKNDKSCPVVAAIITREIGFIVPGLPGTVLRAINGDFLHFLPRVFSAVGNICYTPSKLIEYSDFATSACVLAAECTIFKDAMGKPVPYCYDTNLLEGSISYSELRPDTRYVLMDGSIIQFPNTYLEGSVRVVTTFDAEYCRHGTCERSEVGICLSTSGRWVLNNEHYRALSGVFCGVDAMNLIANIFTPLVQPVGALDVSASVVAGGIIAILVTCAAYYFMKFRRVFGEYNHVVAANALLFLMSFTILCLVPAYSFLPGVYSVFYLYLTFYFTNDVSFLAHLQWFAMFSPIVPFWITAIYVFCISLKHCHWFFNNYLRKRVMFNGVTFSTFEEAALCTFLLNKEMYLKLRSETLLPLTQYNRYLALYNKYKYFSGALDTTSYREAACCHLAKALNDFSNSGADVLYQPPQTSITSAVLQSGFRKMAFPSGKVEGCMVQVTCGTTTLNGLWLDDTVYCPRHVICTAEDMLNPNYEDLLIRKSNHSFLVQAGNVQLRVIGHSMQNCLLRLKVDTSNPKTPKYKFVRIQPGQTFSVLACYNGSPSGVYQCAMRPNHTIKGSFLNGSCGSVGFNIDYDCVSFCYMHHMELPTGVHAGTDLEGKFYGPFVDRQTAQAAGTDTTITLNVLAWLYAAVINGDRWFLNRFTTTLNDFNLVAMKYNYEPLTQDHVDILGPLSAQTGIAVLDMCAALKELLQNGMNGRTILGSTILEDEFTPFDVVRQCSGVTFQGKFKKIVKGTHHWMLLTFLTSLLILVQSTQWSLFFFVYENAFLPFTLGIMAIAACAMLLVKHKHAFLCLFLLPSLATVAYFNMVYMPASWVMRIMTWLELADTSLSGYRLKDCVMYASALVLLILMTARTVYDDAARRVWTLMNVITLVYKVYYGNALDQAISMWALVISVTSNYSGVVTTIMFLARAIVFVCVEYYPLLFITGNTLQCIMLVYCFLGYCCCCYFGLFCLLNRYFRLTLGVYDYLVSTQEFRYMNSQGLLPPKSSIDAFKLNIKLLGIGGKPCIKVATVQSKMSDVKCTSVVLLSVLQQLRVESSSKLWAQCVQLHNDILLAKDTTEAFEKMVSLLSVLLSMQGAVDINRLCEEMLDNRATLQAIASEFSSLPSYAAYATAQEAYEQAVANGDSEVVLKKLKKSLNVAKSEFDRDAAMQRKLEKMADQAMTQMYKQARSEDKRAKVTSAMQTMLFTMLRKLDNDALNNIINNARDGCVPLNIIPLTTAAKLMVVVPDYGTYKNTCDGNTFTYASALWEIQQVVDADSKIVQLSEINMDNSPNLAWPLIVTALRANSAVKLQNNELSPVALRQMSCAAGTTQTACTDDNALAYYNNSKGGRFVLALLSDHQDLKWARFPKSDGTGTIYTELEPPCRFVTDTPKGPKVKYLYFIKGLNNLNRGMVLGSLAATVRLQAGNATEVPANSTVLSFCAFAVDPAKAYKDYLASGGQPITNCVKMLCTHTGTGQAITVTPEANMDQESFGGASCCLYCRCHIDHPNPKGFCDLKGKYVQIPTTCANDPVGFTLRNTVCTVCGMWKGYGCSCDQLREPLMQSADASTFLNRVCGVSAARLTPCGTGTSTDVVYRAFDIYNEKVAGFAKFLKTNCCRFQEKDEEGNLLDSYFVVKRHTMSNYQHEETIYNLVKDCPAVAVHDFFKFRVDGDMVPHISRQRLTKYTMADLVYALRHFDEGNCDTLKEILVTYNCCDDDYFNKKDWYDFVENPDILRVYANLGERVRQSLLKTVQFCDAMRDAGIVGVLTLDNQDLNGNWYDFGDFVQVAPGCGVPIVDSYYSLLMPILTLTRALAAESHMDADLAKPLIKWDLLKYDFTEERLCLFDRYFKYWDQTYHPNCINCLDDRCILHCANFNVLFSTVFPPTSFGPLVRKIFVDGVPFVVSTGYHFRELGVVHNQDVNLHSSRLSFKELLVYAADPAMHAASGNLLLDKRTTCFSVAALTNNVAFQTVKPGNFNKDFYDFAVSKGFFKEGSSVELKHFFFAQDGNAAISDYDYYRYNLPTMCDIRQLLFVVEVVDKYFDCYDGGCINANQVIVNNLDKSAGFPFNKWGKARLYYDSMSYEDQDALFAYTKRNVIPTITQMNLKYAISAKNRARTVAGVSICSTMTNRQFHQKLLKSIAATRGATVVIGTSKFYGGWHNMLKTVYSDVETPHLMGWDYPKCDRAMPNMLRIMASLVLARKHNTCCNLSHRFYRLANECAQVLSEMVMCGGSLYVKPGGTSSGDATTAYANSVFNICQAVTANVNALLSTDGNKIADKYVRNLQHRLYECLYRNRDVDHEFVDEFYAYLRKHFSMMILSDDAVVCYNSNYAAQGLVASIKNFKAVLYYQNNVFMSEAKCWTETDLTKGPHEFCSQHTMLVKQGDDYVYLPYPDPSRILGAGCFVDDIVKTDGTLMIERFVSLAIDAYPLTKHPNQEYADVFHLYLQYIRKLHDELTGHMLDMYSVMLTNDNTSRYWEPEFYEAMYTPHTVLQAVGACVLCNSQTSLRCGACIRRPFLCCKCCYDHVISTSHKLVLSVNPYVCNAPGCDVTDVTQLYLGGMSYYCKSHKPPISFPLCANGQVFGLYKNTCVGSDNVTDFNAIATCDWTNAGDYILANTCTERLKLFAAETLKATEETFKLSYGIATVREVLSDRELHLSWEVGKPRPPLNRNYVFTGYRVTKNSKVQIGEYTFEKGDYGDAVVYRGTTTYKLNVGDYFVLTSHTVMPLSAPTLVPQEHYVRITGLYPTLNISDEFSSNVANYQKVGMQKYSTLQGPPGTGKSHFAIGLALYYPSARIVYTACSHAAVDALCEKALKYLPIDKCSRIIPARARVECFDKFKVNSTLEQYVFCTVNALPETTADIVVFDEISMATNYDLSVVNARLRAKHYVYIGDPAQLPAPRTLLTKGTLEPEYFNSVCRLMKTIGPDMFLGTCRRCPAEIVDTVSALVYDNKLKAHKDKSAQCFKMFYKGVITHDVSSAINRPQIGVVREFLTRNPAWRKAVFISPYNSQNAVASKILGLPTQTVDSSQGSEYDYVIFTQTTETAHSCNVNRFNVAITRAKIGILCIMSDRDLYDKLQFTSLEIPRRNVATLQAENVTGLFKDCSKIITGLHPTQAPTHLSVDIKFKTEGLCVDIPGIPKDMTYRRLISMMGFKMNYQVNGYPNMFITREEAIRHVRAWIGFDVEGCHATRDAVGTNLPLQLGFSTGVNLVAVPTGYVDTENNTEFTRVNAKPPPGDQFKHLIPLMYKGLPWNVVRIKIVQMLSDTLKGLSDRVVFVLWAHGFELTSMKYFVKIGPERTCCLCDKRATCFSTSSDTYACWNHSVGFDYVYNPFMIDVQQWGFTGNLQSNHDQHCQVHGNAHVASCDAIMTRCLAVHECFVKRVDWSVEYPIIGDELRVNSACRKVQHMVVKSALLADKFPVLHDIGNPKAIKCVPQAEVEWKFYDAQPCSDKAYKIEELFYSYATHHDKFTDGVCLFWNCNVDRYPANAIVCRFDTRVLSNLNLPGCDGGSLYVNKHAFHTPAFDKSAFTNLKQLPFFYYSDSPCESHGKQVVSDIDYVPLKSATCITRCNLGGAVCRHHANEYRQYLDAYNMMISAGFSLWIYKQFDTYNLWNTFTRLQSLENVAYNVVNKGHFDGHAGEAPVSIINNAVYTKVDGIDVEIFENKTTLPVNVAFELWAKRNIKPVPEIKILNNLGVDIAANTVIWDYKREAPAHVSTIGVCTMTDIAKKPTESACSSLTVLFDGRVEGQVDLFRNARNGVLITEGSVKGLTPSKGPAQASVNGVTLIGESVKTQFNYFKKVDGIIQQLPETYFTQSRDLEDFKPRSQMETDFLELAMDEFIQRYKLEGYAFEHIVYGDFSHGQLGGLHLMIGLAKRSQDSPLKLEDFIPMDSTVKNYFITDAQTGSSKCVCSVIDLLLDDFVEIIKSQDLSVISKVVKVTIDYAEISFMLWCKDGHVETFYPKLQASRAWQPGVAMPNLYKMQRMLLEKCDLQNYGENAVIPKGIMMNVAKYTQLCQYLNTLTLAVPYNMRVIHFGAGSDKGVAPGTAVLRQWLPTGTLLVDSDLNDFVSDAYSTLIGDCATVHTANKWDLIISDMYDPRTKHVTKENDSKEGFFTYLCGFIKQKLALGGSIAVKITEHSWNADLYKLMGHFSWWTAFVTNVNASSSEAFLIGANYLGKPKEQIDGYTMHANYIFWRNTNPIQLSSYSLFDMSKFPLKLRGTAVMSLKENQINDMIYSLLEKGRLIIRENNRVVVSSDILVNN

SEQ ID NO: 7233 - protein, 4375 aa, SARS coronavirus
MESLVLGVNEKTHVQLSLPVLQVRDVLVRGFGDSVEEALSEAREHLKNGTCGLVELEKGVLPQLEQPYVFIKRSDALSTNHGHKVVELVAEMDGIQYGRSGITLGVLVPHVGETPIAYRNVLLRKNGNKGAGGHSYGIDLKSYDLGDELGTDPIEDYEQNWNTKHGSGALRELTRELNGGAVTRYVDNNFCGPDGYPLDCIKDFLARAGKSMCTLSEQLDYIESKRGVYCCRDHEHEIAWFTERSDKSYEHQTPFEIKSAKKFDTFKGECPKFVFPLNSKVKVIQPRVEKKKTEGFMGRIRSVYPVASPQECNNMHLSTLMKCNHCDEVSWQTCDFLKATCEHCGTENLVIEGPTTCGYLPTNAVVKMPCPACQDPEIGPEHSVADYHNHSNIETRLRKGGRTRCFGGCVFAYVGCYNKRAYWVPRASADIGSGHTGITGDNVETLNEDLLEILSRERVNINIVGDFHLNEEVAIILASFSASTSAFIDTIKSLDYKSFKTIVESCGNYKVTKGKPVKGAWNIGQQRSVLTPLCGFPSQAAGVIRSIFARTLDAANHSIPDLQRAAVTILDGISEQSLRLVDAMVYTSDLLTNSVIIMAYVTGGLVQQTSQWLSNLLGTTVEKLRPIFEWIEAKLSAGVEFLKDAWEILKFLITGVFDIVKGQIQVASDNIKDCVKCFIDVVNKALEMCIDQVTIAGAKLRSLNLGEVFIAQSKGLYRQCIRGKEQLQLLMPLKAPKEVTFLEGDSHDTVLTSEEVVLKNGELEALETPVDSFTNGAIVGTPVCVNGLMLLEIKDKEQYCALSPGLLATNNVFRLKGGAPIKGVTFGEDTVWEVQGYKNVRITFELDERVDKVLNEKCSVYTVESGTEVTEFACVVAEAVVKTLQPVSDLLTNMGIDLDEWSVATFYLFDDAGEENFSSRMYCSFYPPDEEEEDDAECEEEEIDETCEHEYGTEDDYQGLPLEFGASAETVRVEEEEEEDWLDDTTEQSEIEPEPEPTPEEPVNQFTGYLKLTDNVAIKCVDIVKEAQSANPMVIVNAANIHLKHGGGVAGALNKATNGAMQKESDDYIKLNGPLTVGGSCLLSGHNLAKKCLHVVGPNLNAGEDIQLLKAAYENFNSQDILLAPLLSAGIFGAKPLQSLQVCVQTVRTQVYIAVNDKALYEQVVMDYLDNLKPRVEAPKQEEPPNTEDSKTEEKSVVQKPVDVKPKIKACIDEVTTTLEETKFLTNKLLLFADINGKLYHDSQNMLRGEDMSFLEKDAPYMVGDVITSGDITCVVIPSKKAGGTTEMLSRALKKVPVDEYITTYPGQGCAGYTLEEAKTALKKCKSAFYVLPSEAPNAKEEILGTVSWNLREMLAHAEETRKLMPICMDVRAIMATIQRKYKGIKIQEGIVDYGVRFFFYTSKEPVASIITKLNSLNEPLVTMPIGYVTHGFNLEEAARCMRSLKAPAVVSVSSPDAVTTYNGYLTSSSKTSEEHFVETVSLAGSYRDWSYSGQRTELGVEFLKRGDKIVYHTLESPVEFHLDGEVLSLDKLKSLLSLREVKTIKVFTTVDNTNLHTQLVDMSMTYGQQFGPTYLDGADVTKIKPHVNHEGKTFFVLPSDDTLRSEAFEYYHTLDESFLGRYMSALNHTKKWKFPQVGGLTSIKWADNNCYLSSVLLALQQLEVKFNAPALQEAYYRARAGDAANFCALILAYSNKTVGELGDVRETMTHLLQHANLESAKRVLNVVCKHCGQKTTTLTGVEAVMYMGTLSYDNLKTGVSIPCVCGRDATQYLVQQESSFVMMSAPPAEYKLQQGTFLCANEYTGNYQCGHYTHITAKETLYRIDGAHLTKMSEYKGPVTDVFYKETSYTTTIKPVSYKLDGVTYTEIEPKLDGYYKKDNAYYTEQPIDLVPTQPLPNASFDNFKLTCSNTKFADDLNQMTGFTKPASRELSVTFFPDLNGDVVAIDYRHYSASFKKGAKLLHKPIVWHINQATTKTTFKPNTWCLRCLWSTKPVDTSNSFEVLAVEDTQGMDNLACESQQPTSEEVVENPTIQKEVIECDVKTTEVVGNVILKPSDEGVKVTQELGHEDLMAAYVENTSITIKKPNELSLALGLKTIATHGIAAINSVPWSKILAYVKPFLGQAAITTSNCAKRLAQRVFNNYMPYVFTLLFQLCTFTKSTNSRIRASLPTTIAKNSVKSVAKLCLDAGINYVKSPKFSKLFTIAMWLLLLSICLGSLICVTAAFGVLLSNFGAPSYCNGVRELYLNSSNVTTMDFCEGSFPCSICLSGLDSLDSYPALETIQVTISSYKLDLTILGLAAEWVLAYMLFTKFFYLLGLSAIMQVFFGYFASHFISNSWLMWFIISIVQMAPVSAMVRMYIFFASFYYIWKSYVHIMDGCTSSTCMMCYKRNRATRVECTTIVNGMKRSFYVYANGGRGFCKTHNWNCLNCDTFCTGSTFISDEVARDLSLQFKRPINPTDQSSYIVDSVAVKNGALHLYFDKAGQKTYERHPLSHFVNLDNLRANNTKGSLPINVIVFDGKSKCDESASKSASVYYSQLMCQPILLLDQALVSDVGDSTEVSVKMFDAYVDTFSATFSVPMEKLKALVATAHSELAKGVALDGVLSTFVSAARQGVVDTDVDTKDVIECLKLSHHSDLEVTGDSCNNFMLTYNKVENMTPRDLGACIDCNARHINAQVAKSHNVSLIWNVKDYMSLSEQLRKQIRSAAKKNNIPFRLTCATTRQVVNVITTKISLKGGKIVSTCFKLMLKATLLCVLAALVCYIVMPVHTLSIHDGYTNEIIGYKAIQDGVTRDIISTDDCFANKHAGFDAWFSQRGGSYKNDKSCPVVAAIITREIGFIVPGLPGTVLRAINGDFLHFLPRVFSAVGNICYTPSKLIEYSDFATSACVLAAECTIFKDAMGKPVPYCYDTNLLEGSISYSELRPDTRYVLMDGSIIQFPNTYLEGSVRVVTTFDAEYCRHGTCERSEVGICLSTSGRWVLNNEHYRALSGVFCGVDAMNLIANIFTPLVQPVGALDVSASVVAGGIIAILVTCAAYYFMKFRRVFGEYNHVVAANALLFLMSFTILCLVPAYSFLPGVYSVFYLYLTFYFTNDVSFLAHLQWFAMFSPIVPFWITAIYVFCISLKHCHWFFNNYLRKRVMFNGVTFSTFEEAALCTFLLNKEMYLKLRSETLLPLTQYNRYLALYNKYKYFSGALDTTSYREAACCHLAKALNDFSNSGADVLYQPPQTSITSAVLQSGFRKMAFPSGKVEGCMVQVTCGTTTLNGLWLDDTVYCPRHVICTAEDMLNPNYEDLLIRKSNHSFLVQAGNVQLRVIGHSMQNCLLRLKVDTSNPKTPKYKFVRIQPGQTFSVLACYNGSPSGVYQCAMRPNHTIKGSFLNGSCGSVGFNIDYDCVSFCYMHHMELPTGVHAGTDLEGKFYGPFVDRQTAQAAGTDTTITLNVLAWLYAAVINGDRWFLNRFTTTLNDFNLVAMKYNYEPLTQDHVDILGPLSAQTGIAVLDMCAALKELLQNGMNGRTILGSTILEDEFTPFDVVRQCSGVTFQGKFKKIVKGTHHWMLLTFLTSLLILVQSTQWSLFFFVYENAFLPFTLGIMAIAACAMLLVKHKHAFLCLFLLPSLATVAYFNMVYMPASWVMRIMTWLELADTSLSGYRLKDCVMYASALVLLILMTARTVYDDAARRVWTLMNVITLVYKVYYGNALDQAISMWALVISVTSNYSGVVTTIMFLARAIVFVCVEYYPLLFITGNTLQCIMLVYCFLGYCCCCYFGLFCLLNRYFRLTLGVYDYLVSTQEFRYMNSQGLLPPKSSIDAFKLNIKLLGIGGKPCIKVATVQSKMSDVKCTSVVLLSVLQQLRVESSSKLWAQCVQLHNDILLAKDTTEAFEKMVSLLSVLLSMQGAVDINRLCEEMLDNRATLQAIASEFSSLPSYAAYATAQEAYEQAVANGDSEVVLKKLKKSLNVAKSEFDRDAAMQRKLEKMADQAMTQMYKQARSEDKRAKVTSAMQTMLFTMLRKLDNDALNNIINNARDGCVPLNIIPLTTAAKLMVVVPDYGTYKNTCDGNTFTYASALWEIQQVVDADSKIVQLSEINMDNSPNLAWPLIVTALRANSAVKLQNNELSPVALRQMSCAAGTTQTACTDDNALAYYNNSKGGRFVLALLSDHQDLKWARFPKSDGTGTIYTELEPPCRFVTDTPKGPKVKYLYFIKGLNNLNRGMVLGSLAATVRLQAGNATEVPANSTVLSFCAFAVDPAKAYKDYLASGGQPITNCVKMLCTHTGTGQAITVTPEANMDQESFGGASCCLYCRCHIDHPNPKGFCDLKGKYVQIPTTCANDPVGFTLRNTVCTVCGMWKGYGCSCDQLREPLMQSADAST

SEQ ID NO: 7234 - protein, 2692 aa, SARS coronavirus
GVSAARLTPCGTGTSTDVVYRAFDIYNEKVAGFAKFLKTNCCRFQEKDEEGNLLDSYFVVKRHTMSNYQHEETIYNLVKDCPAVAVHDFFKFRVDGDMVPHISRQRLTKYTMADLVYALRHFDEGNCDTLKEILVTYNCCDDDYFNKKDWYDFVENPDILRVYANLGERVRQSLLKTVQFCDAMRDAGIVGVLTLDNQDLNGNWYDFGDFVQVAPGCGVPIVDSYYSLLMPILTLTRALAAESHMDADLAKPLIKWDLLKYDFTEERLCLFDRYFKYWDQTYHPNCINCLDDRCILHCANFNVLFSTVFPPTSFGPLVRKIFVDGVPFVVSTGYHFRELGVVHNQDVNLHSSRLSFKELLVYAADPAMHAASGNLLLDKRTTCFSVAALTNNVAFQTVKPGNFNKDFYDFAVSKGFFKEGSSVELKHFFFAQDGNAAISDYDYYRYNLPTMCDIRQLLFVVEVVDKYFDCYDGGCINANQVIVNNLDKSAGFPFNKWGKARLYYDSMSYEDQDALFAYTKRNVIPTITQMNLKYAISAKNRARTVAGVSICSTMTNRQFHQKLLKSIAATRGATVVIGTSKFYGGWHNMLKTVYSDVETPHLMGWDYPKCDRAMPNMLRIMASLVLARKHNTCCNLSHRFYRLANECAQVLSEMVMCGGSLYVKPGGTSSGDATTAYANSVFNICQAVTANVNALLSTDGNKIADKYVRNLQHRLYECLYRNRDVDHEFVDEFYAYLRKHFSMMILSDDAVVCYNSNYAAQGLVASIKNFKAVLYYQNNVFMSEAKCWTETDLTKGPHEFCSQHTMLVKQGDDYVYLPYPDPSRILGAGCFVDDIVKTDGTLMIERFVSLAIDAYPLTKHPNQEYADVFHLYLQYIRKLHDELTGHMLDMYSVMLTNDNTSRYWEPEFYEAMYTPHTVLQAVGACVLCNSQTSLRCGACIRRPFLCCKCCYDHVISTSHKLVLSVNPYVCNAPGCDVTDVTQLYLGGMSYYCKSHKPPISFPLCANGQVFGLYKNTCVGSDNVTDFNAIATCDWTNAGDYILANTCTERLKLFAAETLKATEETFKLSYGIATVREVLSDRELHLSWEVGKPRPPLNRNYVFTGYRVTKNSKVQIGEYTFEKGDYGDAVVYRGTTTYKLNVGDYFVLTSHTVMPLSAPTLVPQEHYVRITGLYPTLNISDEFSSNVANYQKVGMQKYSTLQGPPGTGKSHFAIGLALYYPSARIVYTACSHAAVDALCEKALKYLPIDKCSRIIPARARVECFDKFKVNSTLEQYVFCTVNALPETTADIVVFDEISMATNYDLSVVNARLRAKHYVYIGDPAQLPAPRTLLTKGTLEPEYFNSVCRLMKTIGPDMFLGTCRRCPAEIVDTVSALVYDNKLKAHKDKSAQCFKMFYKGVITHDVSSAINRPQIGVVREFLTRNPAWRKAVFISPYNSQNAVASKILGLPTQTVDSSQGSEYDYVIFTQTTETAHSCNVNRFNVAITRAKIGILCIMSDRDLYDKLQFTSLEIPRRNVATLQAENVTGLFKDCSKIITGLHPTQAPTHLSVDIKFKTEGLCVDIPGIPKDMTYRRLISMMGFKMNYQVNGYPNMFITREEAIRHVRAWIGFDVEGCHATRDAVGTNLPLQLGFSTGVNLVAVPTGYVDTENNTEFTRVNAKPPPGDQFKHLIPLMYKGLPWNVVRIKIVQMLSDTLKGLSDRVVFVLWAHGFELTSMKYFVKIGPERTCCLCDKRATCFSTSSDTYACWNHSVGFDYVYNPFMIDVQQWGFTGNLQSNHDQHCQVHGNAHVASCDAIMTRCLAVHECFVKRVDWSVEYPIIGDELRVNSACRKVQHMVVKSALLADKFPVLHDIGNPKAIKCVPQAEVEWKFYDAQPCSDKAYKIEELFYSYATHHDKFTDGVCLFWNCNVDRYPANAIVCRFDTRVLSNLNLPGCDGGSLYVNKHAFHTPAFDKSAFTNLKQLPFFYYSDSPCESHGKQVVSDIDYVPLKSATCITRCNLGGAVCRHHANEYRQYLDAYNMMISAGFSLWIYKQFDTYNLWNTFTRLQSLENVAYNVVNKGHFDGHAGEAPVSIINNAVYTKVDGIDVEIFENKTTLPVNVAFELWAKRNIKPVPEIKILNNLGVDIAANTVIWDYKREAPAHVSTIGVCTMTDIAKKPTESACSSLTVLFDGRVEGQVDLFRNARNGVLITEGSVKGLTPSKGPAQASVNGVTLIGESVKTQFNYFKKVDGIIQQLPETYFTQSRDLEDFKPRSQMETDFLELAMDEFIQRYKLEGYAFEHIVYGDFSHGQLGGLHLMIGLAKRSQDSPLKLEDFIPMDSTVKNYFITDAQTGSSKCVCSVIDLLLDDFVEIIKSQDLSVISKVVKVTIDYAEISFMLWCKDGHVETFYPKLQASRAWQPGVAMPNLYKMQRMLLEKCDLQNYGENAVIPKGIMMNVAKYTQLCQYLNTLTLAVPYNMRVIHFGAGSDKGVAPGTAVLRQWLPTGTLLVDSDLNDFVSDAYSTLIGDCATVHTANKWDLIISDMYDPRTKHVTKENDSKEGFFTYLCGFIKQKLALGGSIAVKITEHSWNADLYKLMGHFSWWTAFVTNVNASSSEAFLIGANYLGKPKEQIDGYTMHANYIFWRNTNPIQLSSYSLFDMSKFPLKLRGTAVMSLKENQINDMIYSLLEKGRLIIRENNRVVVSSDILVNN

SEQ ID NO: 7235 - protein, 7068 aa, SARS coronavirus
  misc_feature 4376: Xaa is any amino acid
MESLVLGVNEKTHVQLSLPVLQVRDVLVRGFGDSVEEALSEAREHLKNGTCGLVELEKGVLPQLEQPYVFIKRSDALSTNHGHKVVELVAEMDGIQYGRSGITLGVLVPHVGETPIAYRNVLLRKNGNKGAGGHSYGIDLKSYDLGDELGTDPIEDYEQNWNTKHGSGALRELTRELNGGAVTRYVDNNFCGPDGYPLDCIKDFLARAGKSMCTLSEQLDYIESKRGVYCCRDHEHEIAWFTERSDKSYEHQTPFEIKSAKKFDTFKGECPKFVFPLNSKVKVIQPRVEKKKTEGFMGRIRSVYPVASPQECNNMHLSTLMKCNHCDEVSWQTCDFLKATCEHCGTENLVIEGPTTCGYLPTNAVVKMPCPACQDPEIGPEHSVADYHNHSNIETRLRKGGRTRCFGGCVFAYVGCYNKRAYWVPRASADIGSGHTGITGDNVETLNEDLLEILSRERVNINIVGDFHLNEEVAIILASFSASTSAFIDTIKSLDYKSFKTIVESCGNYKVTKGKPVKGAWNIGQQRSVLTPLCGFPSQAAGVIRSIFARTLDAANHSIPDLQRAAVTILDGISEQSLRLVDAMVYTSDLLTNSVIIMAYVTGGLVQQTSQWLSNLLGTTVEKLRPIFEWIEAKLSAGVEFLKDAWEILKFLITGVFDIVKGQIQVASDNIKDCVKCFIDVVNKALEMCIDQVTIAGAKLRSLNLGEVFIAQSKGLYRQCIRGKEQLQLLMPLKAPKEVTFLEGDSHDTVLTSEEVVLKNGELEALETPVDSFTNGAIVGTPVCVNGLMLLEIKDKEQYCALSPGLLATNNVFRLKGGAPIKGVTFGEDTVWEVQGYKNVRITFELDERVDKVLNEKCSVYTVESGTEVTEFACVVAEAVVKTLQPVSDLLTNMGIDLDEWSVATFYLFDDAGEENFSSRMYCSFYPPDEEEEDDAECEEEEIDETCEHEYGTEDDYQGLPLEFGASAETVRVEEEEEEDWLDDTTEQSEIEPEPEPTPEEPVNQFTGYLKLTDNVAIKCVDIVKEAQSANPMVIVNAANIHLKHGGGVAGALNKATNGAMQKESDDYIKLNGPLTVGGSCLLSGHNLAKKCLHVVGPNLNAGEDIQLLKAAYENFNSQDILLAPLLSAGIFGAKPLQSLQVCVQTVRTQVYIAVNDKALYEQVVMDYLDNLKPRVEAPKQEEPPNTEDSKTEEKSVVQKPVDVKPKIKACIDEVTTTLEETKFLTNKLLLFADINGKLYHDSQNMLRGEDMSFLEKDAPYMVGDVITSGDITCVVIPSKKAGGTTEMLSRALKKVPVDEYITTYPGQGCAGYTLEEAKTALKKCKSAFYVLPSEAPNAKEEILGTVSWNLREMLAHAEETRKLMPICMDVRAIMATIQRKYKGIKIQEGIVDYGVRFFFYTSKEPVASIITKLNSLNEPLVTMPIGYVTHGFNLEEAARCMRSLKAPAVVSVSSPDAVTTYNGYLTSSSKTSEEHFVETVSLAGSYRDWSYSGQRTELGVEFLKRGDKIVYHTLESPVEFHLDGEVLSLDKLKSLLSLREVKTIKVFTTVDNTNLHTQLVDMSMTYGQQFGPTYLDGADVTKIKPHVNHEGKTFFVLPSDDTLRSEAFEYYHTLDESFLGRYMSALNHTKKWKFPQVGGLTSIKWADNNCYLSSVLLALQQLEVKFNAPALQEAYYRARAGDAANFCALILAYSNKTVGELGDVRETMTHLLQHANLESAKRVLNVVCKHCGQKTTTLTGVEAVMYMGTLSYDNLKTGVSIPCVCGRDATQYLVQQESSFVMMSAPPAEYKLQQGTFLCANEYTGNYQCGHYTHITAKETLYRIDGAHLTKMSEYKGPVTDVFYKETSYTTTIKPVSYKLDGVTYTEIEPKLDGYYKKDNAYYTEQPIDLVPTQPLPNASFDNFKLTCSNTKFADDLNQMTGFTKPASRELSVTFFPDLNGDVVAIDYRHYSASFKKGAKLLHKPIVWHINQATTKTTFKPNTWCLRCLWSTKPVDTSNSFEVLAVEDTQGMDNLACESQQPTSEEVVENPTIQKEVIECDVKTTEVVGNVILKPSDEGVKVTQELGHEDLMAAYVENTSITIKKPNELSLALGLKTIATHGIAAINSVPWSKILAYVKPFLGQAAITTSNCAKRLAQRVFNNYMPYVFTLLFQLCTFTKSTNSRIRASLPTTIAKNSVKSVAKLCLDAGINYVKSPKFSKLFTIAMWLLLLSICLGSLICVTAAFGVLLSNFGAPSYCNGVRELYLNSSNVTTMDFCEGSFPCSICLSGLDSLDSYPALETIQVTISSYKLDLTILGLAAEWVLAYMLFTKFFYLLGLSAIMQVFFGYFASHFISNSWLMWFIISIVQMAPVSAMVRMYIFFASFYYIWKSYVHIMDGCTSSTCMMCYKRNRATRVECTTIVNGMKRSFYVYANGGRGFCKTHNWNCLNCDTFCTGSTFISDEVARDLSLQFKRPINPTDQSSYIVDSVAVKNGALHLYFDKAGQKTYERHPLSHFVNLDNLRANNTKGSLPINVIVFDGKSKCDESASKSASVYYSQLMCQPILLLDQALVSDVGDSTEVSVKMFDAYVDTFSATFSVPMEKLKALVATAHSELAKGVALDGVLSTFVSAARQGVVDTDVDTKDVIECLKLSHHSDLEVTGDSCNNFMLTYNKVENMTPRDLGACIDCNARHINAQVAKSHNVSLIWNVKDYMSLSEQLRKQIRSAAKKNNIPFRLTCATTRQVVNVITTKISLKGGKIVSTCFKLMLKATLLCVLAALVCYIVMPVHTLSIHDGYTNEIIGYKAIQDGVTRDIISTDDCFANKHAGFDAWFSQRGGSYKNDKSCPVVAAIITREIGFIVPGLPGTVLRAINGDFLHFLPRVFSAVGNICYTPSKLIEYSDFATSACVLAAECTIFKDAMGKPVPYCYDTNLLEGSISYSELRPDTRYVLMDGSIIQFPNTYLEGSVRVVTTFDAEYCRHGTCERSEVGICLSTSGRWVLNNEHYRALSGVFCGVDAMNLIANIFTPLVQPVGALDVSASVVAGGIIAILVTCAAYYFMKFRRVFGEYNHVVAANALLFLMSFTILCLVPAYSFLPGVYSVFYLYLTFYFTNDVSFLAHLQWFAMFSPIVPFWITAIYVFCISLKHCHWFFNNYLRKRVMFNGVTFSTFEEAALCTFLLNKEMYLKLRSETLLPLTQYNRYLALYNKYKYFSGALDTTSYREAACCHLAKALNDFSNSGADVLYQPPQTSITSAVLQSGFRKMAFPSGKVEGCMVQVTCGTTTLNGLWLDDTVYCPRHVICTAEDMLNPNYEDLLIRKSNHSFLVQAGNVQLRVIGHSMQNCLLRLKVDTSNPKTPKYKFVRIQPGQTFSVLACYNGSPSGVYQCAMRPNHTIKGSFLNGSCGSVGFNIDYDCVSFCYMHHMELPTGVHAGTDLEGKFYGPFVDRQTAQAAGTDTTITLNVLAWLYAAVINGDRWFLNRFTTTLNDFNLVAMKYNYEPLTQDHVDILGPLSAQTGIAVLDMCAALKELLQNGMNGRTILGSTILEDEFTPFDVVRQCSGVTFQGKFKKIVKGTHHWMLLTFLTSLLILVQSTQWSLFFFVYENAFLPFTLGIMAIAACAMLLVKHKHAFLCLFLLPSLATVAYFNMVYMPASWVMRIMTWLELADTSLSGYRLKDCVMYASALVLLILMTARTVYDDAARRVWTLMNVITLVYKVYYGNALDQAISMWALVISVTSNYSGVVTTIMFLARAIVFVCVEYYPLLFITGNTLQCIMLVYCFLGYCCCCYFGLFCLLNRYFRLTLGVYDYLVSTQEFRYMNSQGLLPPKSSIDAFKLNIKLLGIGGKPCIKVATVQSKMSDVKCTSVVLLSVLQQLRVESSSKLWAQCVQLHNDILLAKDTTEAFEKMVSLLSVLLSMQGAVDINRLCEEMLDNRATLQAIASEFSSLPSYAAYATAQEAYEQAVANGDSEVVLKKLKKSLNVAKSEFDRDAAMQRKLEKMADQAMTQMYKQARSEDKRAKVTSAMQTMLFTMLRKLDNDALNNIINNARDGCVPLNIIPLTTAAKLMVVVPDYGTYKNTCDGNTFTYASALWEIQQVVDADSKIVQLSEINMDNSPNLAWPLIVTALRANSAVKLQNNELSPVALRQMSCAAGTTQTACTDDNALAYYNNSKGGRFVLALLSDHQDLKWARFPKSDGTGTIYTELEPPCRFVTDTPKGPKVKYLYFIKGLNNLNRGMVLGSLAATVRLQAGNATEVPANSTVLSFCAFAVDPAKAYKDYLASGGQPITNCVKMLCTHTGTGQAITVTPEANMDQESFGGASCCLYCRCHIDHPNPKGFCDLKGKYVQIPTTCANDPVGFTLRNTVCTVCGMWKGYGCSCDQLREPLMQSADASTXGVSAARLTPCGTGTSTDVVYRAFDIYNEKVAGFAKFLKTNCCRFQEKDEEGNLLDSYFVVKRHTMSNYQHEETIYNLVKDCPAVAVHDFFKFRVDGDMVPHISRQRLTKYTMADLVYALRHFDEGNCDTLKEILVTYNCCDDDYFNKKDWYDFVENPDILRVYANLGERVRQSLLKTVQFCDAMRDAGIVGVLTLDNQDLNGNWYDFGDFVQVAPGCGVPIVDSYYSLLMPILTLTRALAAESHMDADLAKPLIKWDLLKYDFTEERLCLFDRYFKYWDQTYHPNCINCLDDRCILHCANFNVLFSTVFPPTSFGPLVRKIFVDGVPFVVSTGYHFRELGVVHNQDVNLHSSRLSFKELLVYAADPAMHAASGNLLLDKRTTCFSVAALTNNVAFQTVKPGNFNKDFYDFAVSKGFFKEGSSVELKHFFFAQDGNAAISDYDYYRYNLPTMCDIRQLLFVVEVVDKYFDCYDGGCINANQVIVNNLDKSAGFPFNKWGKARLYYDSMSYEDQDALFAYTKRNVIPTITQMNLKYAISAKNRARTVAGVSICSTMTNRQFHQKLLKSIAATRGATVVIGTSKFYGGWHNMLKTVYSDVETPHLMGWDYPKCDRAMPNMLRIMASLVLARKHNTCCNLSHRFYRLANECAQVLSEMVMCGGSLYVKPGGTSSGDATTAYANSVFNICQAVTANVNALLSTDGNKIADKYVRNLQHRLYECLYRNRDVDHEFVDEFYAYLRKHFSMMILSDDAVVCYNSNYAAQGLVASIKNFKAVLYYQNNVFMSEAKCWTETDLTKGPHEFCSQHTMLVKQGDDYVYLPYPDPSRILGAGCFVDDIVKTDGTLMIERFVSLAIDAYPLTKHPNQEYADVFHLYLQYIRKLHDELTGHMLDMYSVMLTNDNTSRYWEPEFYEAMYTPHTVLQAVGACVLCNSQTSLRCGACIRRPFLCCKCCYDHVISTSHKLVLSVNPYVCNAPGCDVTDVTQLYLGGMSYYCKSHKPPISFPLCANGQVFGLYKNTCVGSDNVTDFNAIATCDWTNAGDYILANTCTERLKLFAAETLKATEETFKLSYGIATVREVLSDRELHLSWEVGKPRPPLNRNYVFTGYRVTKNSKVQIGEYTFEKGDYGDAVVYRGTTTYKLNVGDYFVLTSHTVMPLSAPTLVPQEHYVRITGLYPTLNISDEFSSNVANYQKVGMQKYSTLQGPPGTGKSHFAIGLALYYPSARIVYTACSHAAVDALCEKALKYLPIDKCSRIIPARARVECFDKFKVNSTLEQYVFCTVNALPETTADIVVFDEISMATNYDLSVVNARLRAKHYVYIGDPAQLPAPRTLLTKGTLEPEYFNSVCRLMKTIGPDMFLGTCRRCPAEIVDTVSALVYDNKLKAHKDKSAQCFKMFYKGVITHDVSSAINRPQIGVVREFLTRNPAWRKAVFISPYNSQNAVASKILGLPTQTVDSSQGSEYDYVIFTQTTETAHSCNVNRFNVAITRAKIGILCIMSDRDLYDKLQFTSLEIPRRNVATLQAENVTGLFKDCSKIITGLHPTQAPTHLSVDIKFKTEGLCVDIPGIPKDMTYRRLISMMGFKMNYQVNGYPNMFITREEAIRHVRAWIGFDVEGCHATRDAVGTNLPLQLGFSTGVNLVAVPTGYVDTENNTEFTRVNAKPPPGDQFKHLIPLMYKGLPWNVVRIKIVQMLSDTLKGLSDRVVFVLWAHGFELTSMKYFVKIGPERTCCLCDKRATCFSTSSDTYACWNHSVGFDYVYNPFMIDVQQWGFTGNLQSNHDQHCQVHGNAHVASCDAIMTRCLAVHECFVKRVDWSVEYPIIGDELRVNSACRKVQHMVVKSALLADKFPVLHDIGNPKAIKCVPQAEVEWKFYDAQPCSDKAYKIEELFYSYATHHDKFTDGVCLFWNCNVDRYPANAIVCRFDTRVLSNLNLPGCDGGSLYVNKHAFHTPAFDKSAFTNLKQLPFFYYSDSPCESHGKQVVSDIDYVPLKSATCITRCNLGGAVCRHHANEYRQYLDAYNMMISAGFSLWIYKQFDTYNLWNTFTRLQSLENVAYNVVNKGHFDGHAGEAPVSIINNAVYTKVDGIDVEIFENKTTLPVNVAFELWAKRNIKPVPEIKILNNLGVDIAANTVIWDYKREAPAHVSTIGVCTMTDIAKKPTESACSSLTVLFDGRVEGQVDLFRNARNGVLITEGSVKGLTPSKGPAQASVNGVTLIGESVKTQFNYFKKVDGIIQQLPETYFTQSRDLEDFKPRSQMETDFLELAMDEFIQRYKLEGYAFEHIVYGDFSHGQLGGLHLMIGLAKRSQDSPLKLEDFIPMDSTVKNYFITDAQTGSSKCVCSVIDLLLDDFVEIIKSQDLSVISKVVKVTIDYAEISFMLWCKDGHVETFYPKLQASRAWQPGVAMPNLYKMQRMLLEKCDLQNYGENAVIPKGIMMNVAKYTQLCQYLNTLTLAVPYNMRVIHFGAGSDKGVAPGTAVLRQWLPTGTLLVDSDLNDFVSDAYSTLIGDCATVHTANKWDLIISDMYDPRTKHVTKENDSKEGFFTYLCGFIKQKLALGGSIAVKITEHSWNADLYKLMGHFSWWTAFVTNVNASSSEAFLIGANYLGKPKEQIDGYTMHANYIFWRNTNPIQLSSYSLFDMSKFPLKLRGTAVMSLKENQINDMIYSLLEKGRLIIRENNRVVVSSDILVNN

SEQ ID NO: 7236 - protein, 7069 aa, SARS coronavirus
  misc_feature 4376...4377: Xaa is any amino acid
MESLVLGVNEKTHVQLSLPVLQVRDVLVRGFGDSVEEALSEAREHLKNGTCGLVELEKGVLPQLEQPYVFIKRSDALSTNHGHKVVELVAEMDGIQYGRSGITLGVLVPHVGETPIAYRNVLLRKNGNKGAGGHSYGIDLKSYDLGDELGTDPIEDYEQNWNTKHGSGALRELTRELNGGAVTRYVDNNFCGPDGYPLDCIKDFLARAGKSMCTLSEQLDYIESKRGVYCCRDHEHEIAWFTERSDKSYEHQTPFEIKSAKKFDTFKGECPKFVFPLNSKVKVIQPRVEKKKTEGFMGRIRSVYPVASPQECNNMHLSTLMKCNHCDEVSWQTCDFLKATCEHCGTENLVIEGPTTCGYLPTNAVVKMPCPACQDPEIGPEHSVADYHNHSNIETRLRKGGRTRCFGGCVFAYVGCYNKRAYWVPRASADIGSGHTGITGDNVETLNEDLLEILSRERVNINIVGDFHLNEEVAIILASFSASTSAFIDTIKSLDYKSFKTIVESCGNYKVTKGKPVKGAWNIGQQRSVLTPLCGFPSQAAGVIRSIFARTLDAANHSIPDLQRAAVTILDGISEQSLRLVDAMVYTSDLLTNSVIIMAYVTGGLVQQTSQWLSNLLGTTVEKLRPIFEWIEAKLSAGVEFLKDAWEILKFLITGVFDIVKGQIQVASDNIKDCVKCFIDVVNKALEMCIDQVTIAGAKLRSLNLGEVFIAQSKGLYRQCIRGKEQLQLLMPLKAPKEVTFLEGDSHDTVLTSEEVVLKNGELEALETPVDSFTNGAIVGTPVCVNGLMLLEIKDKEQYCALSPGLLATNNVFRLKGGAPIKGVTFGEDTVWEVQGYKNVRITFELDERVDKVLNEKCSVYTVESGTEVTEFACVVAEAVVKTLQPVSDLLTNMGIDLDEWSVATFYLFDDAGEENFSSRMYCSFYPPDEEEEDDAECEEEEIDETCEHEYGTEDDYQGLPLEFGASAETVRVEEEEEEDWLDDTTEQSEIEPEPEPTPEEPVNQFTGYLKLTDNVAIKCVDIVKEAQSANPMVIVNAANIHLKHGGGVAGALNKATNGAMQKESDDYIKLNGPLTVGGSCLLSGHNLAKKCLHVVGPNLNAGEDIQLLKAAYENFNSQDILLAPLLSAGIFGAKPLQSLQVCVQTVRTQVYIAVNDKALYEQVVMDYLDNLKPRVEAPKQEEPPNTEDSKTEEKSVVQKPVDVKPKIKACIDEVTTTLEETKFLTNKLLLFADINGKLYHDSQNMLRGEDMSFLEKDAPYMVGDVITSGDITCVVIPSKKAGGTTEMLSRALKKVPVDEYITTYPGQGCAGYTLEEAKTALKKCKSAFYVLPSEAPNAKEEILGTVSWNLREMLAHAEETRKLMPICMDVRAIMATIQRKYKGIKIQEGIVDYGVRFFFYTSKEPVASIITKLNSLNEPLVTMPIGYVTHGFNLEEAARCMRSLKAPAVVSVSSPDAVTTYNGYLTSSSKTSEEHFVETVSLAGSYRDWSYSGQRTELGVEFLKRGDKIVYHTLESPVEFHLDGEVLSLDKLKSLLSLREVKTIKVFTTVDNTNLHTQLVDMSMTYGQQFGPTYLDGADVTKIKPHVNHEGKTFFVLPSDDTLRSEAFEYYHTLDESFLGRYMSALNHTKKWKFPQVGGLTSIKWADNNCYLSSVLLALQQLEVKFNAPALQEAYYRARAGDAANFCALILAYSNKTVGELGDVRETMTHLLQHANLESAKRVLNVVCKHCGQKTTTLTGVEAVMYMGTLSYDNLKTGVSIPCVCGRDATQYLVQQESSFVMMSAPPAEYKLQQGTFLCANEYTGNYQCGHYTHITAKETLYRIDGAHLTKMSEYKGPVTDVFYKETSYTTTIKPVSYKLDGVTYTEIEPKLDGYYKKDNAYYTEQPIDLVPTQPLPNASFDNFKLTCSNTKFADDLNQMTGFTKPASRELSVTFFPDLNGDVVAIDYRHYSASFKKGAKLLHKPIVWHINQATTKTTFKPNTWCLRCLWSTKPVDTSNSFEVLAVEDTQGMDNLACESQQPTSEEVVENPTIQKEVIECDVKTTEVVGNVILKPSDEGVKVTQELGHEDLMAAYVENTSITIKKPNELSLALGLKTIATHGIAAINSVPWSKILAYVKPFLGQAAITTSNCAKRLAQRVFNNYMPYVFTLLFQLCTFTKSTNSRIRASLPTTIAKNSVKSVAKLCLDAGINYVKSPKFSKLFTIAMWLLLLSICLGSLICVTAAFGVLLSNFGAPSYCNGVRELYLNSSNVTTMDFCEGSFPCSICLSGLDSLDSYPALETIQVTISSYKLDLTILGLAAEWVLAYMLFTKFFYLLGLSAIMQVFFGYFASHFISNSWLMWFIISIVQMAPVSAMVRMYIFFASFYYIWKSYVHIMDGCTSSTCMMCYKRNRATRVECTTIVNGMKRSFYVYANGGRGFCKTHNWNCLNCDTFCTGSTFISDEVARDLSLQFKRPINPTDQSSYIVDSVAVKNGALHLYFDKAGQKTYERHPLSHFVNLDNLRANNTKGSLPINVIVFDGKSKCDESASKSASVYYSQLMCQPILLLDQALVSDVGDSTEVSVKMFDAYVDTFSATFSVPMEKLKALVATAHSELAKGVALDGVLSTFVSAARQGVVDTDVDTKDVIECLKLSHHSDLEVTGDSCNNFMLTYNKVENMTPRDLGACIDCNARHINAQVAKSHNVSLIWNVKDYMSLSEQLRKQIRSAAKKNNIPFRLTCATTRQVVNVITTKISLKGGKIVSTCFKLMLKATLLCVLAALVCYIVMPVHTLSIHDGYTNEIIGYKAIQDGVTRDIISTDDCFANKHAGFDAWFSQRGGSYKNDKSCPVVAAIITREIGFIVPGLPGTVLRAINGDFLHFLPRVFSAVGNICYTPSKLIEYSDFATSACVLAAECTIFKDAMGKPVPYCYDTNLLEGSISYSELRPDTRYVLMDGSIIQFPNTYLEGSVRVVTTFDAEYCRHGTCERSEVGICLSTSGRWVLNNEHYRALSGVFCGVDAMNLIANIFTPLVQPVGALDVSASVVAGGIIAILVTCAAYYFMKFRRVFGEYNHVVAANALLFLMSFTILCLVPAYSFLPGVYSVFYLYLTFYFTNDVSFLAHLQWFAMFSPIVPFWITAIYVFCISLKHCHWFFNNYLRKRVMFNGVTFSTFEEAALCTFLLNKEMYLKLRSETLLPLTQYNRYLALYNKYKYFSGALDTTSYREAACCHLAKALNDFSNSGADVLYQPPQTSITSAVLQSGFRKMAFPSGKVEGCMVQVTCGTTTLNGLWLDDTVYCPRHVICTAEDMLNPNYEDLLIRKSNHSFLVQAGNVQLRVIGHSMQNCLLRLKVDTSNPKTPKYKFVRIQPGQTFSVLACYNGSPSGVYQCAMRPNHTIKGSFLNGSCGSVGFNIDYDCVSFCYMHHMELPTGVHAGTDLEGKFYGPFVDRQTAQAAGTDTTITLNVLAWLYAAVINGDRWFLNRFTTTLNDFNLVAMKYNYEPLTQDHVDILGPLSAQTGIAVLDMCAALKELLQNGMNGRTILGSTILEDEFTPFDVVRQCSGVTFQGKFKKIVKGTHHWMLLTFLTSLLILVQSTQWSLFFFVYENAFLPFTLGIMAIAACAMLLVKHKHAFLCLFLLPSLATVAYFNMVYMPASWVMRIMTWLELADTSLSGYRLKDCVMYASALVLLILMTARTVYDDAARRVWTLMNVITLVYKVYYGNALDQAISMWALVISVTSNYSGVVTTIMFLARAIVFVCVEYYPLLFITGNTLQCIMLVYCFLGYCCCCYFGLFCLLNRYFRLTLGVYDYLVSTQEFRYMNSQGLLPPKSSIDAFKLNIKLLGIGGKPCIKVATVQSKMSDVKCTSVVLLSVLQQLRVESSSKLWAQCVQLHNDILLAKDTTEAFEKMVSLLSVLLSMQGAVDINRLCEEMLDNRATLQAIASEFSSLPSYAAYATAQEAYEQAVANGDSEVVLKKLKKSLNVAKSEFDRDAAMQRKLEKMADQAMTQMYKQARSEDKRAKVTSAMQTMLFTMLRKLDNDALNNIINNARDGCVPLNIIPLTTAAKLMVVVPDYGTYKNTCDGNTFTYASALWEIQQVVDADSKIVQLSEINMDNSPNLAWPLIVTALRANSAVKLQNNELSPVALRQMSCAAGTTQTACTDDNALAYYNNSKGGRFVLALLSDHQDLKWARFPKSDGTGTIYTELEPPCRFVTDTPKGPKVKYLYFIKGLNNLNRGMVLGSLAATVRLQAGNATEVPANSTVLSFCAFAVDPAKAYKDYLASGGQPITNCVKMLCTHTGTGQAITVTPEANMDQESFGGASCCLYCRCHIDHPNPKGFCDLKGKYVQIPTTCANDPVGFTLRNTVCTVCGMWKGYGCSCDQLREPLMQSADASTXXGVSAARLTPCGTGTSTDVVYRAFDIYNEKVAGFAKFLKTNCCRFQEKDEEGNLLDSYFVVKRHTMSNYQHEETIYNLVKDCPAVAVHDFFKFRVDGDMVPHISRQRLTKYTMADLVYALRHFDEGNCDTLKEILVTYNCCDDDYFNKKDWYDFVENPDILRVYANLGERVRQSLLKTVQFCDAMRDAGIVGVLTLDNQDLNGNWYDFGDFVQVAPGCGVPIVDSYYSLLMPILTLTRALAAESHMDADLAKPLIKWDLLKYDFTEERLCLFDRYFKYWDQTYHPNCINCLDDRCILHCANFNVLFSTVFPPTSFGPLVRKIFVDGVPFVVSTGYHFRELGVVHNQDVNLHSSRLSFKELLVYAADPAMHAASGNLLLDKRTTCFSVAALTNNVAFQTVKPGNFNKDFYDFAVSKGFFKEGSSVELKHFFFAQDGNAAISDYDYYRYNLPTMCDIRQLLFVVEVVDKYFDCYDGGCINANQVIVNNLDKSAGFPFNKWGKARLYYDSMSYEDQDALFAYTKRNVIPTITQMNLKYAISAKNRARTVAGVSICSTMTNRQFHQKLLKSIAATRGATVVIGTSKFYGGWHNMLKTVYSDVETPHLMGWDYPKCDRAMPNMLRIMASLVLARKHNTCCNLSHRFYRLANECAQVLSEMVMCGGSLYVKPGGTSSGDATTAYANSVFNICQAVTANVNALLSTDGNKIADKYVRNLQHRLYECLYRNRDVDHEFVDEFYAYLRKHFSMMILSDDAVVCYNSNYAAQGLVASIKNFKAVLYYQNNVFMSEAKCWTETDLTKGPHEFCSQHTMLVKQGDDYVYLPYPDPSRILGAGCFVDDIVKTDGTLMIERFVSLAIDAYPLTKHPNQEYADVFHLYLQYIRKLHDELTGHMLDMYSVMLTNDNTSRYWEPEFYEAMYTPHTVLQAVGACVLCNSQTSLRCGACIRRPFLCCKCCYDHVISTSHKLVLSVNPYVCNAPGCDVTDVTQLYLGGMSYYCKSHKPPISFPLCANGQVFGLYKNTCVGSDNVTDFNAIATCDWTNAGDYILANTCTERLKLFAAETLKATEETFKLSYGIATVREVLSDRELHLSWEVGKPRPPLNRNYVFTGYRVTKNSKVQIGEYTFEKGDYGDAVVYRGTTTYKLNVGDYFVLTSHTVMPLSAPTLVPQEHYVRITGLYPTLNISDEFSSNVANYQKVGMQKYSTLQGPPGTGKSHFAIGLALYYPSARIVYTACSHAAVDALCEKALKYLPIDKCSRIIPARARVECFDKFKVNSTLEQYVFCTVNALPETTADIVVFDEISMATNYDLSVVNARLRAKHYVYIGDPAQLPAPRTLLTKGTLEPEYFNSVCRLMKTIGPDMFLGTCRRCPAEIVDTVSALVYDNKLKAHKDKSAQCFKMFYKGVITHDVSSAINRPQIGVVREFLTRNPAWRKAVFISPYNSQNAVASKILGLPTQTVDSSQGSEYDYVIFTQTTETAHSCNVNRFNVAITRAKIGILCIMSDRDLYDKLQFTSLEIPRRNVATLQAENVTGLFKDCSKIITGLHPTQAPTHLSVDIKFKTEGLCVDIPGIPKDMTYRRLISMMGFKMNYQVNGYPNMFITREEAIRHVRAWIGFDVEGCHATRDAVGTNLPLQLGFSTGVNLVAVPTGYVDTENNTEFTRVNAKPPPGDQFKHLIPLMYKGLPWNVVRIKIVQMLSDTLKGLSDRVVFVLWAHGFELTSMKYFVKIGPERTCCLCDKRATCFSTSSDTYACWNHSVGFDYVYNPFMIDVQQWGFTGNLQSNHDQHCQVHGNAHVASCDAIMTRCLAVHECFVKRVDWSVEYPIIGDELRVNSACRKVQHMVVKSALLADKFPVLHDIGNPKAIKCVPQAEVEWKFYDAQPCSDKAYKIEELFYSYATHHDKFTDGVCLFWNCNVDRYPANAIVCRFDTRVLSNLNLPGCDGGSLYVNKHAFHTPAFDKSAFTNLKQLPFFYYSDSPCESHGKQVVSDIDYVPLKSATCITRCNLGGAVCRHHANEYRQYLDAYNMMISAGFSLWIYKQFDTYNLWNTFTRLQSLENVAYNVVNKGHFDGHAGEAPVSIINNAVYTKVDGIDVEIFENKTTLPVNVAFELWAKRNIKPVPEIKILNNLGVDIAANTVIWDYKREAPAHVSTIGVCTMTDIAKKPTESACSSLTVLFDGRVEGQVDLFRNARNGVLITEGSVKGLTPSKGPAQASVNGVTLIGESVKTQFNYFKKVDGIIQQLPETYFTQSRDLEDFKPRSQMETDFLELAMDEFIQRYKLEGYAFEHIVYGDFSHGQLGGLHLMIGLAKRSQDSPLKLEDFIPMDSTVKNYFITDAQTGSSKCVCSVIDLLLDDFVEIIKSQDLSVISKVVKVTIDYAEISFMLWCKDGHVETFYPKLQASRAWQPGVAMPNLYKMQRMLLEKCDLQNYGENAVIPKGIMMNVAKYTQLCQYLNTLTLAVPYNMRVIHFGAGSDKGVAPGTAVLRQWLPTGTLLVDSDLNDFVSDAYSTLIGDCATVHTANKWDLIISDMYDPRTKHVTKENDSKEGFFTYLCGFIKQKLALGGSIAVKITEHSWNADLYKLMGHFSWWTAFVTNVNASSSEAFLIGANYLGKPKEQIDGYTMHANYIFWRNTNPIQLSSYSLFDMSKFPLKLRGTAVMSLKENQINDMIYSLLEKGRLIIRENNRVVVSSDILVNN

SEQ ID NO: 7237 - protein, 7070 aa, SARS coronavirus
  misc_feature 4376...4378: Xaa is any amino acid
MESLVLGVNEKTHVQLSLPVLQVRDVLVRGFGDSVEEALSEAREHLKNGTCGLVELEKGVLPQLEQPYVFIKRSDALSTNHGHKVVELVAEMDGIQYGRSGITLGVLVPHVGETPIAYRNVLLRKNGNKGAGGHSYGIDLKSYDLGDELGTDPIEDYEQNWNTKHGSGALRELTRELNGGAVTRYVDNNFCGPDGYPLDCIKDFLARAGKSMCTLSEQLDYIESKRGVYCCRDHEHEIAWFTERSDKSYEHQTPFEIKSAKKFDTFKGECPKFVFPLNSKVKVIQPRVEKKKTEGFMGRIRSVYPVASPQECNNMHLSTLMKCNHCDEVSWQTCDFLKATCEHCGTENLVIEGPTTCGYLPTNAVVKMPCPACQDPEIGPEHSVADYHNHSNIETRLRKGGRTRCFGGCVFAYVGCYNKRAYWVPRASADIGSGHTGITGDNVETLNEDLLEILSRERVNINIVGDFHLNEEVAIILASFSASTSAFIDTIKSLDYKSFKTIVESCGNYKVTKGKPVKGAWNIGQQRSVLTPLCGFPSQAAGVIRSIFARTLDAANHSIPDLQRAAVTILDGISEQSLRLVDAMVYTSDLLTNSVIIMAYVTGGLVQQTSQWLSNLLGTTVEKLRPIFEWIEAKLSAGVEFLKDAWEILKFLITGVFDIVKGQIQVASDNIKDCVKCFIDVVNKALEMCIDQVTIAGAKLRSLNLGEVFIAQSKGLYRQCIRGKEQLQLLMPLKAPKEVTFLEGDSHDTVLTSEEVVLKNGELEALETPVDSFTNGAIVGTPVCVNGLMLLEIKDKEQYCALSPGLLATNNVFRLKGGAPIKGVTFGEDTVWEVQGYKNVRITFELDERVDKVLNEKCSVYTVESGTEVTEFACVVAEAVVKTLQPVSDLLTNMGIDLDEWSVATFYLFDDAGEENFSSRMYCSFYPPDEEEEDDAECEEEEIDETCEHEYGTEDDYQGLPLEFGASAETVRVEEEEEEDWLDDTTEQSEIEPEPEPTPEEPVNQFTGYLKLTDNVAIKCVDIVKEAQSANPMVIVNAANIHLKHGGGVAGALNKATNGAMQKESDDYIKLNGPLTVGGSCLLSGHNLAKKCLHVVGPNLNAGEDIQLLKAAYENFNSQDILLAPLLSAGIFGAKPLQSLQVCVQTVRTQVYIAVNDKALYEQVVMDYLDNLKPRVEAPKQEEPPNTEDSKTEEKSVVQKPVDVKPKIKACIDEVTTTLEETKFLTNKLLLFADINGKLYHDSQNMLRGEDMSFLEKDAPYMVGDVITSGDITCVVIPSKKAGGTTEMLSRALKKVPVDEYITTYPGQGCAGYTLEEAKTALKKCKSAFYVLPSEAPNAKEEILGTVSWNLREMLAHAEETRKLMPICMDVRAIMATIQRKYKGIKIQEGIVDYGVRFFFYTSKEPVASIITKLNSLNEPLVTMPIGYVTHGFNLEEAARCMRSLKAPAVVSVSSPDAVTTYNGYLTSSSKTSEEHFVETVSLAGSYRDWSYSGQRTELGVEFLKRGDKIVYHTLESPVEFHLDGEVLSLDKLKSLLSLREVKTIKVFTTVDNTNLHTQLVDMSMTYGQQFGPTYLDGADVTKIKPHVNHEGKTFFVLPSDDTLRSEAFEYYHTLDESFLGRYMSALNHTKKWKFPQVGGLTSIKWADNNCYLSSVLLALQQLEVKFNAPALQEAYYRARAGDAANFCALILAYSNKTVGELGDVRETMTHLLQHANLESAKRVLNVVCKHCGQKTTTLTGVEAVMYMGTLSYDNLKTGVSIPCVCGRDATQYLVQQESSFVMMSAPPAEYKLQQGTFLCANEYTGNYQCGHYTHITAKETLYRIDGAHLTKMSEYKGPVTDVFYKETSYTTTIKPVSYKLDGVTYTEIEPKLDGYYKKDNAYYTEQPIDLVPTQPLPNASFDNFKLTCSNTKFADDLNQMTGFTKPASRELSVTFFPDLNGDVVAIDYRHYSASFKKGAKLLHKPIVWHINQATTKTTFKPNTWCLRCLWSTKPVDTSNSFEVLAVEDTQGMDNLACESQQPTSEEVVENPTIQKEVIECDVKTTEVVGNVILKPSDEGVKVTQELGHEDLMAAYVENTSITIKKPNELSLALGLKTIATHGIAAINSVPWSKILAYVKPFLGQAAITTSNCAKRLAQRVFNNYMPYVFTLLFQLCTFTKSTNSRIRASLPTTIAKNSVKSVAKLCLDAGINYVKSPKFSKLFTIAMWLLLLSICLGSLICVTAAFGVLLSNFGAPSYCNGVRELYLNSSNVTTMDFCEGSFPCSICLSGLDSLDSYPALETIQVTISSYKLDLTILGLAAEWVLAYMLFTKFFYLLGLSAIMQVFFGYFASHFISNSWLMWFIISIVQMAPVSAMVRMYIFFASFYYIWKSYVHIMDGCTSSTCMMCYKRNRATRVECTTIVNGMKRSFYVYANGGRGFCKTHNWNCLNCDTFCTGSTFISDEVARDLSLQFKRPINPTDQSSYIVDSVAVKNGALHLYFDKAGQKTYERHPLSHFVNLDNLRANNTKGSLPINVIVFDGKSKCDESASKSASVYYSQLMCQPILLLDQALVSDVGDSTEVSVKMFDAYVDTFSATFSVPMEKLKALVATAHSELAKGVALDGVLSTFVSAARQGVVDTDVDTKDVIECLKLSHHSDLEVTGDSCNNFMLTYNKVENMTPRDLGACIDCNARHINAQVAKSHNVSLIWNVKDYMSLSEQLRKQIRSAAKKNNIPFRLTCATTRQVVNVITTKISLKGGKIVSTCFKLMLKATLLCVLAALVCYIVMPVHTLSIHDGYTNEIIGYKAIQDGVTRDIISTDDCFANKHAGFDAWFSQRGGSYKNDKSCPVVAAIITREIGFIVPGLPGTVLRAINGDFLHFLPRVFSAVGNICYTPSKLIEYSDFATSACVLAAECTIFKDAMGKPVPYCYDTNLLEGSISYSELRPDTRYVLMDGSIIQFPNTYLEGSVRVVTTFDAEYCRHGTCERSEVGICLSTSGRWVLNNEHYRALSGVFCGVDAMNLIANIFTPLVQPVGALDVSASVVAGGIIAILVTCAAYYFMKFRRVFGEYNHVVAANALLFLMSFTILCLVPAYSFLPGVYSVFYLYLTFYFTNDVSFLAHLQWFAMFSPIVPFWITAIYVFCISLKHCHWFFNNYLRKRVMFNGVTFSTFEEAALCTFLLNKEMYLKLRSETLLPLTQYNRYLALYNKYKYFSGALDTTSYREAACCHLAKALNDFSNSGADVLYQPPQTSITSAVLQSGFRKMAFPSGKVEGCMVQVTCGTTTLNGLWLDDTVYCPRHVICTAEDMLNPNYEDLLIRKSNHSFLVQAGNVQLRVIGHSMQNCLLRLKVDTSNPKTPKYKFVRIQPGQTFSVLACYNGSPSGVYQCAMRPNHTIKGSFLNGSCGSVGFNIDYDCVSFCYMHHMELPTGVHAGTDLEGKFYGPFVDRQTAQAAGTDTTITLNVLAWLYAAVINGDRWFLNRFTTTLNDFNLVAMKYNYEPLTQDHVDILGPLSAQTGIAVLDMCAALKELLQNGMNGRTILGSTILEDEFTPFDVVRQCSGVTFQGKFKKIVKGTHHWMLLTFLTSLLILVQSTQWSLFFFVYENAFLPFTLGIMAIAACAMLLVKHKHAFLCLFLLPSLATVAYFNMVYMPASWVMRIMTWLELADTSLSGYRLKDCVMYASALVLLILMTARTVYDDAARRVWTLMNVITLVYKVYYGNALDQAISMWALVISVTSNYSGVVTTIMFLARAIVFVCVEYYPLLFITGNTLQCIMLVYCFLGYCCCCYFGLFCLLNRYFRLTLGVYDYLVSTQEFRYMNSQGLLPPKSSIDAFKLNIKLLGIGGKPCIKVATVQSKMSDVKCTSVVLLSVLQQLRVESSSKLWAQCVQLHNDILLAKDTTEAFEKMVSLLSVLLSMQGAVDINRLCEEMLDNRATLQAIASEFSSLPSYAAYATAQEAYEQAVANGDSEVVLKKLKKSLNVAKSEFDRDAAMQRKLEKMADQAMTQMYKQARSEDKRAKVTSAMQTMLFTMLRKLDNDALNNIINNARDGCVPLNIIPLTTAAKLMVVVPDYGTYKNTCDGNTFTYASALWEIQQVVDADSKIVQLSEINMDNSPNLAWPLIVTALRANSAVKLQNNELSPVALRQMSCAAGTTQTACTDDNALAYYNNSKGGRFVLALLSDHQDLKWARFPKSDGTGTIYTELEPPCRFVTDTPKGPKVKYLYFIKGLNNLNRGMVLGSLAATVRLQAGNATEVPANSTVLSFCAFAVDPAKAYKDYLASGGQPITNCVKMLCTHTGTGQAITVTPEANMDQESFGGASCCLYCRCHIDHPNPKGFCDLKGKYVQIPTTCANDPVGFTLRNTVCTVCGMWKGYGCSCDQLREPLMQSADASTXXXGVSAARLTPCGTGTSTDVVYRAFDIYNEKVAGFAKFLKTNCCRFQEKDEEGNLLDSYFVVKRHTMSNYQHEETIYNLVKDCPAVAVHDFFKFRVDGDMVPHISRQRLTKYTMADLVYALRHFDEGNCDTLKEILVTYNCCDDDYFNKKDWYDFVENPDILRVYANLGERVRQSLLKTVQFCDAMRDAGIVGVLTLDNQDLNGNWYDFGDFVQVAPGCGVPIVDSYYSLLMPILTLTRALAAESHMDADLAKPLIKWDLLKYDFTEERLCLFDRYFKYWDQTYHPNCINCLDDRCILHCANFNVLFSTVFPPTSFGPLVRKIFVDGVPFVVSTGYHFRELGVVHNQDVNLHSSRLSFKELLVYAADPAMHAASGNLLLDKRTTCFSVAALTNNVAFQTVKPGNFNKDFYDFAVSKGFFKEGSSVELKHFFFAQDGNAAISDYDYYRYNLPTMCDIRQLLFVVEVVDKYFDCYDGGCINANQVIVNNLDKSAGFPFNKWGKARLYYDSMSYEDQDALFAYTKRNVIPTITQMNLKYAISAKNRARTVAGVSICSTMTNRQFHQKLLKSIAATRGATVVIGTSKFYGGWHNMLKTVYSDVETPHLMGWDYPKCDRAMPNMLRIMASLVLARKHNTCCNLSHRFYRLANECAQVLSEMVMCGGSLYVKPGGTSSGDATTAYANSVFNICQAVTANVNALLSTDGNKIADKYVRNLQHRLYECLYRNRDVDHEFVDEFYAYLRKHFSMMILSDDAVVCYNSNYAAQGLVASIKNFKAVLYYQNNVFMSEAKCWTETDLTKGPHEFCSQHTMLVKQGDDYVYLPYPDPSRILGAGCFVDDIVKTDGTLMIERFVSLAIDAYPLTKHPNQEYADVFHLYLQYIRKLHDELTGHMLDMYSVMLTNDNTSRYWEPEFYEAMYTPHTVLQAVGACVLCNSQTSLRCGACIRRPFLCCKCCYDHVISTSHKLVLSVNPYVCNAPGCDVTDVTQLYLGGMSYYCKSHKPPISFPLCANGQVFGLYKNTCVGSDNVTDFNAIATCDWTNAGDYILANTCTERLKLFAAETLKATEETFKLSYGIATVREVLSDRELHLSWEVGKPRPPLNRNYVFTGYRVTKNSKVQIGEYTFEKGDYGDAVVYRGTTTYKLNVGDYFVLTSHTVMPLSAPTLVPQEHYVRITGLYPTLNISDEFSSNVANYQKVGMQKYSTLQGPPGTGKSHFAIGLALYYPSARIVYTACSHAAVDALCEKALKYLPIDKCSRIIPARARVECFDKFKVNSTLEQYVFCTVNALPETTADIVVFDEISMATNYDLSVVNARLRAKHYVYIGDPAQLPAPRTLLTKGTLEPEYFNSVCRLMKTIGPDMFLGTCRRCPAEIVDTVSALVYDNKLKAHKDKSAQCFKMFYKGVITHDVSSAINRPQIGVVREFLTRNPAWRKAVFISPYNSQNAVASKILGLPTQTVDSSQGSEYDYVIFTQTTETAHSCNVNRFNVAITRAKIGILCIMSDRDLYDKLQFTSLEIPRRNVATLQAENVTGLFKDCSKIITGLHPTQAPTHLSVDIKFKTEGLCVDIPGIPKDMTYRRLISMMGFKMNYQVNGYPNMFITREEAIRHVRAWIGFDVEGCHATRDAVGTNLPLQLGFSTGVNLVAVPTGYVDTENNTEFTRVNAKPPPGDQFKHLIPLMYKGLPWNVVRIKIVQMLSDTLKGLSDRVVFVLWAHGFELTSMKYFVKIGPERTCCLCDKRATCFSTSSDTYACWNHSVGFDYVYNPFMIDVQQWGFTGNLQSNHDQHCQVHGNAHVASCDAIMTRCLAVHECFVKRVDWSVEYPIIGDELRVNSACRKVQHMVVKSALLADKFPVLHDIGNPKAIKCVPQAEVEWKFYDAQPCSDKAYKIEELFYSYATHHDKFTDGVCLFWNCNVDRYPANAIVCRFDTRVLSNLNLPGCDGGSLYVNKHAFHTPAFDKSAFTNLKQLPFFYYSDSPCESHGKQVVSDIDYVPLKSATCITRCNLGGAVCRHHANEYRQYLDAYNMMISAGFSLWIYKQFDTYNLWNTFTRLQSLENVAYNVVNKGHFDGHAGEAPVSIINNAVYTKVDGIDVEIFENKTTLPVNVAFELWAKRNIKPVPEIKILNNLGVDIAANTVIWDYKREAPAHVSTIGVCTMTDIAKKPTESACSSLTVLFDGRVEGQVDLFRNARNGVLITEGSVKGLTPSKGPAQASVNGVTLIGESVKTQFNYFKKVDGIIQQLPETYFTQSRDLEDFKPRSQMETDFLELAMDEFIQRYKLEGYAFEHIVYGDFSHGQLGGLHLMIGLAKRSQDSPLKLEDFIPMDSTVKNYFITDAQTGSSKCVCSVIDLLLDDFVEIIKSQDLSVISKVVKVTIDYAEISFMLWCKDGHVETFYPKLQASRAWQPGVAMPNLYKMQRMLLEKCDLQNYGENAVIPKGIMMNVAKYTQLCQYLNTLTLAVPYNMRVIHFGAGSDKGVAPGTAVLRQWLPTGTLLVDSDLNDFVSDAYSTLIGDCATVHTANKWDLIISDMYDPRTKHVTKENDSKEGFFTYLCGFIKQKLALGGSIAVKITEHSWNADLYKLMGHFSWWTAFVTNVNASSSEAFLIGANYLGKPKEQIDGYTMHANYIFWRNTNPIQLSSYSLFDMSKFPLKLRGTAVMSLKENQINDMIYSLLEKGRLIIRENNRVVVSSDILVNN

SEQ ID NO: 7238 - protein, 7071 aa, SARS coronavirus
  misc_feature 4376...4379: Xaa is any amino acid
MESLVLGVNEKTHVQLSLPVLQVRDVLVRGFGDSVEEALSEAREHLKNGTCGLVELEKGVLPQLEQPYVFIKRSDALSTNHGHKVVELVAEMDGIQYGRSGITLGVLVPHVGETPIAYRNVLLRKNGNKGAGGHSYGIDLKSYDLGDELGTDPIEDYEQNWNTKHGSGALRELTRELNGGAVTRYVDNNFCGPDGYPLDCIKDFLARAGKSMCTLSEQLDYIESKRGVYCCRDHEHEIAWFTERSDKSYEHQTPFEIKSAKKFDTFKGECPKFVFPLNSKVKVIQPRVEKKKTEGFMGRIRSVYPVASPQECNNMHLSTLMKCNHCDEVSWQTCDFLKATCEHCGTENLVIEGPTTCGYLPTNAVVKMPCPACQDPEIGPEHSVADYHNHSNIETRLRKGGRTRCFGGCVFAYVGCYNKRAYWVPRASADIGSGHTGITGDNVETLNEDLLEILSRERVNINIVGDFHLNEEVAIILASFSASTSAFIDTIKSLDYKSFKTIVESCGNYKVTKGKPVKGAWNIGQQRSVLTPLCGFPSQAAGVIRSIFARTLDAANHSIPDLQRAAVTILDGISEQSLRLVDAMVYTSDLLTNSVIIMAYVTGGLVQQTSQWLSNLLGTTVEKLRPIFEWIEAKLSAGVEFLKDAWEILKFLITGVFDIVKGQIQVASDNIKDCVKCFIDVVNKALEMCIDQVTIAGAKLRSLNLGEVFIAQSKGLYRQCIRGKEQLQLLMPLKAPKEVTFLEGDSHDTVLTSEEVVLKNGELEALETPVDSFTNGAIVGTPVCVNGLMLLEIKDKEQYCALSPGLLATNNVFRLKGGAPIKGVTFGEDTVWEVQGYKNVRITFELDERVDKVLNEKCSVYTVESGTEVTEFACVVAEAVVKTLQPVSDLLTNMGIDLDEWSVATFYLFDDAGEENFSSRMYCSFYPPDEEEEDDAECEEEEIDETCEHEYGTEDDYQGLPLEFGASAETVRVEEEEEEDWLDDTTEQSEIEPEPEPTPEEPVNQFTGYLKLTDNVAIKCVDIVKEAQSANPMVIVNAANIHLKHGGGVAGALNKATNGAMQKESDDYIKLNGPLTVGGSCLLSGHNLAKKCLHVVGPNLNAGEDIQLLKAAYENFNSQDILLAPLLSAGIFGAKPLQSLQVCVQTVRTQVYIAVNDKALYEQVVMDYLDNLKPRVEAPKQEEPPNTEDSKTEEKSVVQKPVDVKPKIKACIDEVTTTLEETKFLTNKLLLFADINGKLYHDSQNMLRGEDMSFLEKDAPYMVGDVITSGDITCVVIPSKKAGGTTEMLSRALKKVPVDEYITTYPGQGCAGYTLEEAKTALKKCKSAFYVLPSEAPNAKEEILGTVSWNLREMLAHAEETRKLMPICMDVRAIMATIQRKYKGIKIQEGIVDYGVRFFFYTSKEPVASIITKLNSLNEPLVTMPIGYVTHGFNLEEAARCMRSLKAPAVVSVSSPDAVTTYNGYLTSSSKTSEEHFVETVSLAGSYRDWSYSGQRTELGVEFLKRGDKIVYHTLESPVEFHLDGEVLSLDKLKSLLSLREVKTIKVFTTVDNTNLHTQLVDMSMTYGQQFGPTYLDGADVTKIKPHVNHEGKTFFVLPSDDTLRSEAFEYYHTLDESFLGRYMSALNHTKKWKFPQVGGLTSIKWADNNCYLSSVLLALQQLEVKFNAPALQEAYYRARAGDAANFCALILAYSNKTVGELGDVRETMTHLLQHANLESAKRVLNVVCKHCGQKTTTLTGVEAVMYMGTLSYDNLKTGVSIPCVCGRDATQYLVQQESSFVMMSAPPAEYKLQQGTFLCANEYTGNYQCGHYTHITAKETLYRIDGAHLTKMSEYKGPVTDVFYKETSYTTTIKPVSYKLDGVTYTEIEPKLDGYYKKDNAYYTEQPIDLVPTQPLPNASFDNFKLTCSNTKFADDLNQMTGFTKPASRELSVTFFPDLNGDVVAIDYRHYSASFKKGAKLLHKPIVWHINQATTKTTFKPNTWCLRCLWSTKPVDTSNSFEVLAVEDTQGMDNLACESQQPTSEEVVENPTIQKEVIECDVKTTEVVGNVILKPSDEGVKVTQELGHEDLMAAYVENTSITIKKPNELSLALGLKTIATHGIAAINSVPWSKILAYVKPFLGQAAITTSNCAKRLAQRVFNNYMPYVFTLLFQLCTFTKSTNSRIRASLPTTIAKNSVKSVAKLCLDAGINYVKSPKFSKLFTIAMWLLLLSICLGSLICVTAAFGVLLSNFGAPSYCNGVRELYLNSSNVTTMDFCEGSFPCSICLSGLDSLDSYPALETIQVTISSYKLDLTILGLAAEWVLAYMLFTKFFYLLGLSAIMQVFFGYFASHFISNSWLMWFIISIVQMAPVSAMVRMYIFFASFYYIWKSYVHIMDGCTSSTCMMCYKRNRATRVECTTIVNGMKRSFYVYANGGRGFCKTHNWNCLNCDTFCTGSTFISDEVARDLSLQFKRPINPTDQSSYIVDSVAVKNGALHLYFDKAGQKTYERHPLSHFVNLDNLRANNTKGSLPINVIVFDGKSKCDESASKSASVYYSQLMCQPILLLDQALVSDVGDSTEVSVKMFDAYVDTFSATFSVPMEKLKALVATAHSELAKGVALDGVLSTFVSAARQGVVDTDVDTKDVIECLKLSHHSDLEVTGDSCNNFMLTYNKVENMTPRDLGACIDCNARHINAQVAKSHNVSLIWNVKDYMSLSEQLRKQIRSAAKKNNIPFRLTCATTRQVVNVITTKISLKGGKIVSTCFKLMLKATLLCVLAALVCYIVMPVHTLSIHDGYTNEIIGYKAIQDGVTRDIISTDDCFANKHAGFDAWFSQRGGSYKNDKSCPVVAAIITREIGFIVPGLPGTVLRAINGDFLHFLPRVFSAVGNICYTPSKLIEYSDFATSACVLAAECTIFKDAMGKPVPYCYDTNLLEGSISYSELRPDTRYVLMDGSIIQFPNTYLEGSVRVVTTFDAEYCRHGTCERSEVGICLSTSGRWVLNNEHYRALSGVFCGVDAMNLIANIFTPLVQPVGALDVSASVVAGGIIAILVTCAAYYFMKFRRVFGEYNHVVAANALLFLMSFTILCLVPAYSFLPGVYSVFYLYLTFYFTNDVSFLAHLQWFAMFSPIVPFWITAIYVFCISLKHCHWFFNNYLRKRVMFNGVTFSTFEEAALCTFLLNKEMYLKLRSETLLPLTQYNRYLALYNKYKYFSGALDTTSYREAACCHLAKALNDFSNSGADVLYQPPQTSITSAVLQSGFRKMAFPSGKVEGCMVQVTCGTTTLNGLWLDDTVYCPRHVICTAEDMLNPNYEDLLIRKSNHSFLVQAGNVQLRVIGHSMQNCLLRLKVDTSNPKTPKYKFVRIQPGQTFSVLACYNGSPSGVYQCAMRPNHTIKGSFLNGSCGSVGFNIDYDCVSFCYMHHMELPTGVHAGTDLEGKFYGPFVDRQTAQAAGTDTTITLNVLAWLYAAVINGDRWFLNRFTTTLNDFNLVAMKYNYEPLTQDHVDILGPLSAQTGIAVLDMCAALKELLQNGMNGRTILGSTILEDEFTPFDVVRQCSGVTFQGKFKKIVKGTHHWMLLTFLTSLLILVQSTQWSLFFFVYENAFLPFTLGIMAIAACAMLLVKHKHAFLCLFLLPSLATVAYFNMVYMPASWVMRIMTWLELADTSLSGYRLKDCVMYASALVLLILMTARTVYDDAARRVWTLMNVITLVYKVYYGNALDQAISMWALVISVTSNYSGVVTTIMFLARAIVFVCVEYYPLLFITGNTLQCIMLVYCFLGYCCCCYFGLFCLLNRYFRLTLGVYDYLVSTQEFRYMNSQGLLPPKSSIDAFKLNIKLLGIGGKPCIKVATVQSKMSDVKCTSVVLLSVLQQLRVESSSKLWAQCVQLHNDILLAKDTTEAFEKMVSLLSVLLSMQGAVDINRLCEEMLDNRATLQAIASEFSSLPSYAAYATAQEAYEQAVANGDSEVVLKKLKKSLNVAKSEFDRDAAMQRKLEKMADQAMTQMYKQARSEDKRAKVTSAMQTMLFTMLRKLDNDALNNIINNARDGCVPLNIIPLTTAAKLMVVVPDYGTYKNTCDGNTFTYASALWEIQQVVDADSKIVQLSEINMDNSPNLAWPLIVTALRANSAVKLQNNELSPVALRQMSCAAGTTQTACTDDNALAYYNNSKGGRFVLALLSDHQDLKWARFPKSDGTGTIYTELEPPCRFVTDTPKGPKVKYLYFIKGLNNLNRGMVLGSLAATVRLQAGNATEVPANSTVLSFCAFAVDPAKAYKDYLASGGQPITNCVKMLCTHTGTGQAITVTPEANMDQESFGGASCCLYCRCHIDHPNPKGFCDLKGKYVQIPTTCANDPVGFTLRNTVCTVCGMWKGYGCSCDQLREPLMQSADASTXXXXGVSAARLTPCGTGTSTDVVYRAFDIYNEKVAGFAKFLKTNCCRFQEKDEEGNLLDSYFVVKRHTMSNYQHEETIYNLVKDCPAVAVHDFFKFRVDGDMVPHISRQRLTKYTMADLVYALRHFDEGNCDTLKEILVTYNCCDDDYFNKKDWYDFVENPDILRVYANLGERVRQSLLKTVQFCDAMRDAGIVGVLTLDNQDLNGNWYDFGDFVQVAPGCGVPIVDSYYSLLMPILTLTRALAAESHMDADLAKPLIKWDLLKYDFTEERLCLFDRYFKYWDQTYHPNCINCLDDRCILHCANFNVLFSTVFPPTSFGPLVRKIFVDGVPFVVSTGYHFRELGVVHNQDVNLHSSRLSFKELLVYAADPAMHAASGNLLLDKRTTCFSVAALTNNVAFQTVKPGNFNKDFYDFAVSKGFFKEGSSVELKHFFFAQDGNAAISDYDYYRYNLPTMCDIRQLLFVVEVVDKYFDCYDGGCINANQVIVNNLDKSAGFPFNKWGKARLYYDSMSYEDQDALFAYTKRNVIPTITQMNLKYAISAKNRARTVAGVSICSTMTNRQFHQKLLKSIAATRGATVVIGTSKFYGGWHNMLKTVYSDVETPHLMGWDYPKCDRAMPNMLRIMASLVLARKHNTCCNLSHRFYRLANECAQVLSEMVMCGGSLYVKPGGTSSGDATTAYANSVFNICQAVTANVNALLSTDGNKIADKYVRNLQHRLYECLYRNRDVDHEFVDEFYAYLRKHFSMMILSDDAVVCYNSNYAAQGLVASIKNFKAVLYYQNNVFMSEAKCWTETDLTKGPHEFCSQHTMLVKQGDDYVYLPYPDPSRILGAGCFVDDIVKTDGTLMIERFVSLAIDAYPLTKHPNQEYADVFHLYLQYIRKLHDELTGHMLDMYSVMLTNDNTSRYWEPEFYEAMYTPHTVLQAVGACVLCNSQTSLRCGACIRRPFLCCKCCYDHVISTSHKLVLSVNPYVCNAPGCDVTDVTQLYLGGMSYYCKSHKPPISFPLCANGQVFGLYKNTCVGSDNVTDFNAIATCDWTNAGDYILANTCTERLKLFAAETLKATEETFKLSYGIATVREVLSDRELHLSWEVGKPRPPLNRNYVFTGYRVTKNSKVQIGEYTFEKGDYGDAVVYRGTTTYKLNVGDYFVLTSHTVMPLSAPTLVPQEHYVRITGLYPTLNISDEFSSNVANYQKVGMQKYSTLQGPPGTGKSHFAIGLALYYPSARIVYTACSHAAVDALCEKALKYLPIDKCSRIIPARARVECFDKFKVNSTLEQYVFCTVNALPETTADIVVFDEISMATNYDLSVVNARLRAKHYVYIGDPAQLPAPRTLLTKGTLEPEYFNSVCRLMKTIGPDMFLGTCRRCPAEIVDTVSALVYDNKLKAHKDKSAQCFKMFYKGVITHDVSSAINRPQIGVVREFLTRNPAWRKAVFISPYNSQNAVASKILGLPTQTVDSSQGSEYDYVIFTQTTETAHSCNVNRFNVAITRAKIGILCIMSDRDLYDKLQFTSLEIPRRNVATLQAENVTGLFKDCSKIITGLHPTQAPTHLSVDIKFKTEGLCVDIPGIPKDMTYRRLISMMGFKMNYQVNGYPNMFITREEAIRHVRAWIGFDVEGCHATRDAVGTNLPLQLGFSTGVNLVAVPTGYVDTENNTEFTRVNAKPPPGDQFKHLIPLMYKGLPWNVVRIKIVQMLSDTLKGLSDRVVFVLWAHGFELTSMKYFVKIGPERTCCLCDKRATCFSTSSDTYACWNHSVGFDYVYNPFMIDVQQWGFTGNLQSNHDQHCQVHGNAHVASCDAIMTRCLAVHECFVKRVDWSVEYPIIGDELRVNSACRKVQHMVVKSALLADKFPVLHDIGNPKAIKCVPQAEVEWKFYDAQPCSDKAYKIEELFYSYATHHDKFTDGVCLFWNCNVDRYPANAIVCRFDTRVLSNLNLPGCDGGSLYVNKHAFHTPAFDKSAFTNLKQLPFFYYSDSPCESHGKQVVSDIDYVPLKSATCITRCNLGGAVCRHHANEYRQYLDAYNMMISAGFSLWIYKQFDTYNLWNTFTRLQSLENVAYNVVNKGHFDGHAGEAPVSIINNAVYTKVDGIDVEIFENKTTLPVNVAFELWAKRNIKPVPEIKILNNLGVDIAANTVIWDYKREAPAHVSTIGVCTMTDIAKKPTESACSSLTVLFDGRVEGQVDLFRNARNGVLITEGSVKGLTPSKGPAQASVNGVTLIGESVKTQFNYFKKVDGIIQQLPETYFTQSRDLEDFKPRSQMETDFLELAMDEFIQRYKLEGYAFEHIVYGDFSHGQLGGLHLMIGLAKRSQDSPLKLEDFIPMDSTVKNYFITDAQTGSSKCVCSVIDLLLDDFVEIIKSQDLSVISKVVKVTIDYAEISFMLWCKDGHVETFYPKLQASRAWQPGVAMPNLYKMQRMLLEKCDLQNYGENAVIPKGIMMNVAKYTQLCQYLNTLTLAVPYNMRVIHFGAGSDKGVAPGTAVLRQWLPTGTLLVDSDLNDFVSDAYSTLIGDCATVHTANKWDLIISDMYDPRTKHVTKENDSKEGFFTYLCGFIKQKLALGGSIAVKITEHSWNADLYKLMGHFSWWTAFVTNVNASSSEAFLIGANYLGKPKEQIDGYTMHANYIFWRNTNPIQLSSYSLFDMSKFPLKLRGTAVMSLKENQINDMIYSLLEKGRLIIRENNRVVVSSDILVNN

SEQ ID NO: 7239 - protein, 7072 aa, SARS coronavirus
  misc_feature 4376...4380: Xaa is any amino acid
MESLVLGVNEKTHVQLSLPVLQVRDVLVRGFGDSVEEALSEAREHLKNGTCGLVELEKGVLPQLEQPYVFIKRSDALSTNHGHKVVELVAEMDGIQYGRSGITLGVLVPHVGETPIAYRNVLLRKNGNKGAGGHSYGIDLKSYDLGDELGTDPIEDYEQNWNTKHGSGALRELTRELNGGAVTRYVDNNFCGPDGYPLDCIKDFLARAGKSMCTLSEQLDYIESKRGVYCCRDHEHEIAWFTERSDKSYEHQTPFEIKSAKKFDTFKGECPKFVFPLNSKVKVIQPRVEKKKTEGFMGRIRSVYPVASPQECNNMHLSTLMKCNHCDEVSWQTCDFLKATCEHCGTENLVIEGPTTCGYLPTNAVVKMPCPACQDPEIGPEHSVADYHNHSNIETRLRKGGRTRCFGGCVFAYVGCYNKRAYWVPRASADIGSGHTGITGDNVETLNEDLLEILSRERVNINIVGDFHLNEEVAIILASFSASTSAFIDTIKSLDYKSFKTIVESCGNYKVTKGKPVKGAWNIGQQRSVLTPLCGFPSQAAGVIRSIFARTLDAANHSIPDLQRAAVTILDGISEQSLRLVDAMVYTSDLLTNSVIIMAYVTGGLVQQTSQWLSNLLGTTVEKLRPIFEWIEAKLSAGVEFLKDAWEILKFLITGVFDIVKGQIQVASDNIKDCVKCFIDVVNKALEMCIDQVTIAGAKLRSLNLGEVFIAQSKGLYRQCIRGKEQLQLLMPLKAPKEVTFLEGDSHDTVLTSEEVVLKNGELEALETPVDSFTNGAIVGTPVCVNGLMLLEIKDKEQYCALSPGLLATNNVFRLKGGAPIKGVTFGEDTVWEVQGYKNVRITFELDERVDKVLNEKCSVYTVESGTEVTEFACVVAEAVVKTLQPVSDLLTNMGIDLDEWSVATFYLFDDAGEENFSSRMYCSFYPPDEEEEDDAECEEEEIDETCEHEYGTEDDYQGLPLEFGASAETVRVEEEEEEDWLDDTTEQSEIEPEPEPTPEEPVNQFTGYLKLTDNVAIKCVDIVKEAQSANPMVIVNAANIHLKHGGGVAGALNKATNGAMQKESDDYIKLNGPLTVGGSCLLSGHNLAKKCLHVVGPNLNAGEDIQLLKAAYENFNSQDILLAPLLSAGIFGAKPLQSLQVCVQTVRTQVYIAVNDKALYEQVVMDYLDNLKPRVEAPKQEEPPNTEDSKTEEKSVVQKPVDVKPKIKACIDEVTTTLEETKFLTNKLLLFADINGKLYHDSQNMLRGEDMSFLEKDAPYMVGDVITSGDITCVVIPSKKAGGTTEMLSRALKKVPVDEYITTYPGQGCAGYTLEEAKTALKKCKSAFYVLPSEAPNAKEEILGTVSWNLREMLAHAEETRKLMPICMDVRAIMATIQRKYKGIKIQEGIVDYGVRFFFYTSKEPVASIITKLNSLNEPLVTMPIGYVTHGFNLEEAARCMRSLKAPAVVSVSSPDAVTTYNGYLTSSSKTSEEHFVETVSLAGSYRDWSYSGQRTELGVEFLKRGDKIVYHTLESPVEFHLDGEVLSLDKLKSLLSLREVKTIKVFTTVDNTNLHTQLVDMSMTYGQQFGPTYLDGADVTKIKPHVNHEGKTFFVLPSDDTLRSEAFEYYHTLDESFLGRYMSALNHTKKWKFPQVGGLTSIKWADNNCYLSSVLLALQQLEVKFNAPALQEAYYRARAGDAANFCALILAYSNKTVGELGDVRETMTHLLQHANLESAKRVLNVVCKHCGQKTTTLTGVEAVMYMGTLSYDNLKTGVSIPCVCGRDATQYLVQQESSFVMMSAPPAEYKLQQGTFLCANEYTGNYQCGHYTHITAKETLYRIDGAHLTKMSEYKGPVTDVFYKETSYTTTIKPVSYKLDGVTYTEIEPKLDGYYKKDNAYYTEQPIDLVPTQPLPNASFDNFKLTCSNTKFADDLNQMTGFTKPASRELSVTFFPDLNGDVVAIDYRHYSASFKKGAKLLHKPIVWHINQATTKTTFKPNTWCLRCLWSTKPVDTSNSFEVLAVEDTQGMDNLACESQQPTSEEVVENPTIQKEVIECDVKTTEVVGNVILKPSDEGVKVTQELGHEDLMAAYVENTSITIKKPNELSLALGLKTIATHGIAAINSVPWSKILAYVKPFLGQAAITTSNCAKRLAQRVFNNYMPYVFTLLFQLCTFTKSTNSRIRASLPTTIAKNSVKSVAKLCLDAGINYVKSPKFSKLFTIAMWLLLLSICLGSLICVTAAFGVLLSNFGAPSYCNGVRELYLNSSNVTTMDFCEGSFPCSICLSGLDSLDSYPALETIQVTISSYKLDLTILGLAAEWVLAYMLFTKFFYLLGLSAIMQVFFGYFASHFISNSWLMWFIISIVQMAPVSAMVRMYIFFASFYYIWKSYVHIMDGCTSSTCMMCYKRNRATRVECTTIVNGMKRSFYVYANGGRGFCKTHNWNCLNCDTFCTGSTFISDEVARDLSLQFKRPINPTDQSSYIVDSVAVKNGALHLYFDKAGQKTYERHPLSHFVNLDNLRANNTKGSLPINVIVFDGKSKCDESASKSASVYYSQLMCQPILLLDQALVSDVGDSTEVSVKMFDAYVDTFSATFSVPMEKLKALVATAHSELAKGVALDGVLSTFVSAARQGVVDTDVDTKDVIECLKLSHHSDLEVTGDSCNNFMLTYNKVENMTPRDLGACIDCNARHINAQVAKSHNVSLIWNVKDYMSLSEQLRKQIRSAAKKNNIPFRLTCATTRQVVNVITTKISLKGGKIVSTCFKLMLKATLLCVLAALVCYIVMPVHTLSIHDGYTNEIIGYKAIQDGVTRDIISTDDCFANKHAGFDAWFSQRGGSYKNDKSCPVVAAIITREIGFIVPGLPGTVLRAINGDFLHFLPRVFSAVGNICYTPSKLIEYSDFATSACVLAAECTIFKDAMGKPVPYCYDTNLLEGSISYSELRPDTRYVLMDGSIIQFPNTYLEGSVRVVTTFDAEYCRHGTCERSEVGICLSTSGRWVLNNEHYRALSGVFCGVDAMNLIANIFTPLVQPVGALDVSASVVAGGIIAILVTCAAYYFMKFRRVFGEYNHVVAANALLFLMSFTILCLVPAYSFLPGVYSVFYLYLTFYFTNDVSFLAHLQWFAMFSPIVPFWITAIYVFCISLKHCHWFFNNYLRKRVMFNGVTFSTFEEAALCTFLLNKEMYLKLRSETLLPLTQYNRYLALYNKYKYFSGALDTTSYREAACCHLAKALNDFSNSGADVLYQPPQTSITSAVLQSGFRKMAFPSGKVEGCMVQVTCGTTTLNGLWLDDTVYCPRHVICTAEDMLNPNYEDLLIRKSNHSFLVQAGNVQLRVIGHSMQNCLLRLKVDTSNPKTPKYKFVRIQPGQTFSVLACYNGSPSGVYQCAMRPNHTIKGSFLNGSCGSVGFNIDYDCVSFCYMHHMELPTGVHAGTDLEGKFYGPFVDRQTAQAAGTDTTITLNVLAWLYAAVINGDRWFLNRFTTTLNDFNLVAMKYNYEPLTQDHVDILGPLSAQTGIAVLDMCAALKELLQNGMNGRTILGSTILEDEFTPFDVVRQCSGVTFQGKFKKIVKGTHHWMLLTFLTSLLILVQSTQWSLFFFVYENAFLPFTLGIMAIAACAMLLVKHKHAFLCLFLLPSLATVAYFNMVYMPASWVMRIMTWLELADTSLSGYRLKDCVMYASALVLLILMTARTVYDDAARRVWTLMNVITLVYKVYYGNALDQAISMWALVISVTSNYSGVVTTIMFLARAIVFVCVEYYPLLFITGNTLQCIMLVYCFLGYCCCCYFGLFCLLNRYFRLTLGVYDYLVSTQEFRYMNSQGLLPPKSSIDAFKLNIKLLGIGGKPCIKVATVQSKMSDVKCTSVVLLSVLQQLRVESSSKLWAQCVQLHNDILLAKDTTEAFEKMVSLLSVLLSMQGAVDINRLCEEMLDNRATLQAIASEFSSLPSYAAYATAQEAYEQAVANGDSEVVLKKLKKSLNVAKSEFDRDAAMQRKLEKMADQAMTQMYKQARSEDKRAKVTSAMQTMLFTMLRKLDNDALNNIINNARDGCVPLNIIPLTTAAKLMVVVPDYGTYKNTCDGNTFTYASALWEIQQVVDADSKIVQLSEINMDNSPNLAWPLIVTALRANSAVKLQNNELSPVALRQMSCAAGTTQTACTDDNALAYYNNSKGGRFVLALLSDHQDLKWARFPKSDGTGTIYTELEPPCRFVTDTPKGPKVKYLYFIKGLNNLNRGMVLGSLAATVRLQAGNATEVPANSTVLSFCAFAVDPAKAYKDYLASGGQPITNCVKMLCTHTGTGQAITVTPEANMDQESFGGASCCLYCRCHIDHPNPKGFCDLKGKYVQIPTTCANDPVGFTLRNTVCTVCGMWKGYGCSCDQLREPLMQSADASTXXXXXGVSAARLTPCGTGTSTDVVYRAFDIYNEKVAGFAKFLKTNCCRFQEKDEEGNLLDSYFVVKRHTMSNYQHEETIYNLVKDCPAVAVHDFFKFRVDGDMVPHISRQRLTKYTMADLVYALRHFDEGNCDTLKEILVTYNCCDDDYFNKKDWYDFVENPDILRVYANLGERVRQSLLKTVQFCDAMRDAGIVGVLTLDNQDLNGNWYDFGDFVQVAPGCGVPIVDSYYSLLMPILTLTRALAAESHMDADLAKPLIKWDLLKYDFTEERLCLFDRYFKYWDQTYHPNCINCLDDRCILHCANFNVLFSTVFPPTSFGPLVRKIFVDGVPFVVSTGYHFRELGVVHNQDVNLHSSRLSFKELLVYAADPAMHAASGNLLLDKRTTCFSVAALTNNVAFQTVKPGNFNKDFYDFAVSKGFFKEGSSVELKHFFFAQDGNAAISDYDYYRYNLPTMCDIRQLLFVVEVVDKYFDCYDGGCINANQVIVNNLDKSAGFPFNKWGKARLYYDSMSYEDQDALFAYTKRNVIPTITQMNLKYAISAKNRARTVAGVSICSTMTNRQFHQKLLKSIAATRGATVVIGTSKFYGGWHNMLKTVYSDVETPHLMGWDYPKCDRAMPNMLRIMASLVLARKHNTCCNLSHRFYRLANECAQVLSEMVMCGGSLYVKPGGTSSGDATTAYANSVFNICQAVTANVNALLSTDGNKIADKYVRNLQHRLYECLYRNRDVDHEFVDEFYAYLRKHFSMMILSDDAVVCYNSNYAAQGLVASIKNFKAVLYYQNNVFMSEAKCWTETDLTKGPHEFCSQHTMLVKQGDDYVYLPYPDPSRILGAGCFVDDIVKTDGTLMIERFVSLAIDAYPLTKHPNQEYADVFHLYLQYIRKLHDELTGHMLDMYSVMLTNDNTSRYWEPEFYEAMYTPHTVLQAVGACVLCNSQTSLRCGACIRRPFLCCKCCYDHVISTSHKLVLSVNPYVCNAPGCDVTDVTQLYLGGMSYYCKSHKPPISFPLCANGQVFGLYKNTCVGSDNVTDFNAIATCDWTNAGDYILANTCTERLKLFAAETLKATEETFKLSYGIATVREVLSDRELHLSWEVGKPRPPLNRNYVFTGYRVTKNSKVQIGEYTFEKGDYGDAVVYRGTTTYKLNVGDYFVLTSHTVMPLSAPTLVPQEHYVRITGLYPTLNISDEFSSNVANYQKVGMQKYSTLQGPPGTGKSHFAIGLALYYPSARIVYTACSHAAVDALCEKALKYLPIDKCSRIIPARARVECFDKFKVNSTLEQYVFCTVNALPETTADIVVFDEISMATNYDLSVVNARLRAKHYVYIGDPAQLPAPRTLLTKGTLEPEYFNSVCRLMKTIGPDMFLGTCRRCPAEIVDTVSALVYDNKLKAHKDKSAQCFKMFYKGVITHDVSSAINRPQIGVVREFLTRNPAWRKAVFISPYNSQNAVASKILGLPTQTVDSSQGSEYDYVIFTQTTETAHSCNVNRFNVAITRAKIGILCIMSDRDLYDKLQFTSLEIPRRNVATLQAENVTGLFKDCSKIITGLHPTQAPTHLSVDIKFKTEGLCVDIPGIPKDMTYRRLISMMGFKMNYQVNGYPNMFITREEAIRHVRAWIGFDVEGCHATRDAVGTNLPLQLGFSTGVNLVAVPTGYVDTENNTEFTRVNAKPPPGDQFKHLIPLMYKGLPWNVVRIKIVQMLSDTLKGLSDRVVFVLWAHGFELTSMKYFVKIGPERTCCLCDKRATCFSTSSDTYACWNHSVGFDYVYNPFMIDVQQWGFTGNLQSNHDQHCQVHGNAHVASCDAIMTRCLAVHECFVKRVDWSVEYPIIGDELRVNSACRKVQHMVVKSALLADKFPVLHDIGNPKAIKCVPQAEVEWKFYDAQPCSDKAYKIEELFYSYATHHDKFTDGVCLFWNCNVDRYPANAIVCRFDTRVLSNLNLPGCDGGSLYVNKHAFHTPAFDKSAFTNLKQLPFFYYSDSPCESHGKQVVSDIDYVPLKSATCITRCNLGGAVCRHHANEYRQYLDAYNMMISAGFSLWIYKQFDTYNLWNTFTRLQSLENVAYNVVNKGHFDGHAGEAPVSIINNAVYTKVDGIDVEIFENKTTLPVNVAFELWAKRNIKPVPEIKILNNLGVDIAANTVIWDYKREAPAHVSTIGVCTMTDIAKKPTESACSSLTVLFDGRVEGQVDLFRNARNGVLITEGSVKGLTPSKGPAQASVNGVTLIGESVKTQFNYFKKVDGIIQQLPETYFTQSRDLEDFKPRSQMETDFLELAMDEFIQRYKLEGYAFEHIVYGDFSHGQLGGLHLMIGLAKRSQDSPLKLEDFIPMDSTVKNYFITDAQTGSSKCVCSVIDLLLDDFVEIIKSQDLSVISKVVKVTIDYAEISFMLWCKDGHVETFYPKLQASRAWQPGVAMPNLYKMQRMLLEKCDLQNYGENAVIPKGIMMNVAKYTQLCQYLNTLTLAVPYNMRVIHFGAGSDKGVAPGTAVLRQWLPTGTLLVDSDLNDFVSDAYSTLIGDCATVHTANKWDLIISDMYDPRTKHVTKENDSKEGFFTYLCGFIKQKLALGGSIAVKITEHSWNADLYKLMGHFSWWTAFVTNVNASSSEAFLIGANYLGKPKEQIDGYTMHANYIFWRNTNPIQLSSYSLFDMSKFPLKLRGTAVMSLKENQINDMIYSLLEKGRLIIRENNRVVVSSDILVNN

SEQ ID NO: 7240 - protein, 7073 aa, SARS coronavirus
  misc_feature 4376...4381: Xaa is any amino acid
MESLVLGVNEKTHVQLSLPVLQVRDVLVRGFGDSVEEALSEAREHLKNGTCGLVELEKGVLPQLEQPYVFIKRSDALSTNHGHKVVELVAEMDGIQYGRSGITLGVLVPHVGETPIAYRNVLLRKNGNKGAGGHSYGIDLKSYDLGDELGTDPIEDYEQNWNTKHGSGALRELTRELNGGAVTRYVDNNFCGPDGYPLDCIKDFLARAGKSMCTLSEQLDYIESKRGVYCCRDHEHEIAWFTERSDKSYEHQTPFEIKSAKKFDTFKGECPKFVFPLNSKVKVIQPRVEKKKTEGFMGRIRSVYPVASPQECNNMHLSTLMKCNHCDEVSWQTCDFLKATCEHCGTENLVIEGPTTCGYLPTNAVVKMPCPACQDPEIGPEHSVADYHNHSNIETRLRKGGRTRCFGGCVFAYVGCYNKRAYWVPRASADIGSGHTGITGDNVETLNEDLLEILSRERVNINIVGDFHLNEEVAIILASFSASTSAFIDTIKSLDYKSFKTIVESCGNYKVTKGKPVKGAWNIGQQRSVLTPLCGFPSQAAGVIRSIFARTLDAANHSIPDLQRAAVTILDGISEQSLRLVDAMVYTSDLLTNSVIIMAYVTGGLVQQTSQWLSNLLGTTVEKLRPIFEWIEAKLSAGVEFLKDAWEILKFLITGVFDIVKGQIQVASDNIKDCVKCFIDVVNKALEMCIDQVTIAGAKLRSLNLGEVFIAQSKGLYRQCIRGKEQLQLLMPLKAPKEVTFLEGDSHDTVLTSEEVVLKNGELEALETPVDSFTNGAIVGTPVCVNGLMLLEIKDKEQYCALSPGLLATNNVFRLKGGAPIKGVTFGEDTVWEVQGYKNVRITFELDERVDKVLNEKCSVYTVESGTEVTEFACVVAEAVVKTLQPVSDLLTNMGIDLDEWSVATFYLFDDAGEENFSSRMYCSFYPPDEEEEDDAECEEEEIDETCEHEYGTEDDYQGLPLEFGASAETVRVEEEEEEDWLDDTTEQSEIEPEPEPTPEEPVNQFTGYLKLTDNVAIKCVDIVKEAQSANPMVIVNAANIHLKHGGGVAGALNKATNGAMQKESDDYIKLNGPLTVGGSCLLSGHNLAKKCLHVVGPNLNAGEDIQLLKAAYENFNSQDILLAPLLSAGIFGAKPLQSLQVCVQTVRTQVYIAVNDKALYEQVVMDYLDNLKPRVEAPKQEEPPNTEDSKTEEKSVVQKPVDVKPKIKACIDEVTTTLEETKFLTNKLLLFADINGKLYHDSQNMLRGEDMSFLEKDAPYMVGDVITSGDITCVVIPSKKAGGTTEMLSRALKKVPVDEYITTYPGQGCAGYTLEEAKTALKKCKSAFYVLPSEAPNAKEEILGTVSWNLREMLAHAEETRKLMPICMDVRAIMATIQRKYKGIKIQEGIVDYGVRFFFYTSKEPVASIITKLNSLNEPLVTMPIGYVTHGFNLEEAARCMRSLKAPAVVSVSSPDAVTTYNGYLTSSSKTSEEHFVETVSLAGSYRDWSYSGQRTELGVEFLKRGDKIVYHTLESPVEFHLDGEVLSLDKLKSLLSLREVKTIKVFTTVDNTNLHTQLVDMSMTYGQQFGPTYLDGADVTKIKPHVNHEGKTFFVLPSDDTLRSEAFEYYHTLDESFLGRYMSALNHTKKWKFPQVGGLTSIKWADNNCYLSSVLLALQQLEVKFNAPALQEAYYRARAGDAANFCALILAYSNKTVGELGDVRETMTHLLQHANLESAKRVLNVVCKHCGQKTTTLTGVEAVMYMGTLSYDNLKTGVSIPCVCGRDATQYLVQQESSFVMMSAPPAEYKLQQGTFLCANEYTGNYQCGHYTHITAKETLYRIDGAHLTKMSEYKGPVTDVFYKETSYTTTIKPVSYKLDGVTYTEIEPKLDGYYKKDNAYYTEQPIDLVPTQPLPNASFDNFKLTCSNTKFADDLNQMTGFTKPASRELSVTFFPDLNGDVVAIDYRHYSASFKKGAKLLHKPIVWHINQATTKTTFKPNTWCLRCLWSTKPVDTSNSFEVLAVEDTQGMDNLACESQQPTSEEVVENPTIQKEVIECDVKTTEVVGNVILKPSDEGVKVTQELGHEDLMAAYVENTSITIKKPNELSLALGLKTIATHGIAAINSVPWSKILAYVKPFLGQAAITTSNCAKRLAQRVFNNYMPYVFTLLFQLCTFTKSTNSRIRASLPTTIAKNSVKSVAKLCLDAGINYVKSPKFSKLFTIAMWLLLLSICLGSLICVTAAFGVLLSNFGAPSYCNGVRELYLNSSNVTTMDFCEGSFPCSICLSGLDSLDSYPALETIQVTISSYKLDLTILGLAAEWVLAYMLFTKFFYLLGLSAIMQVFFGYFASHFISNSWLMWFIISIVQMAPVSAMVRMYIFFASFYYIWKSYVHIMDGCTSSTCMMCYKRNRATRVECTTIVNGMKRSFYVYANGGRGFCKTHNWNCLNCDTFCTGSTFISDEVARDLSLQFKRPINPTDQSSYIVDSVAVKNGALHLYFDKAGQKTYERHPLSHFVNLDNLRANNTKGSLPINVIVFDGKSKCDESASKSASVYYSQLMCQPILLLDQALVSDVGDSTEVSVKMFDAYVDTFSATFSVPMEKLKALVATAHSELAKGVALDGVLSTFVSAARQGVVDTDVDTKDVIECLKLSHHSDLEVTGDSCNNFMLTYNKVENMTPRDLGACIDCNARHINAQVAKSHNVSLIWNVKDYMSLSEQLRKQIRSAAKKNNIPFRLTCATTRQVVNVITTKISLKGGKIVSTCFKLMLKATLLCVLAALVCYIVMPVHTLSIHDGYTNEIIGYKAIQDGVTRDIISTDDCFANKHAGFDAWFSQRGGSYKNDKSCPVVAAIITREIGFIVPGLPGTVLRAINGDFLHFLPRVFSAVGNICYTPSKLIEYSDFATSACVLAAECTIFKDAMGKPVPYCYDTNLLEGSISYSELRPDTRYVLMDGSIIQFPNTYLEGSVRVVTTFDAEYCRHGTCERSEVGICLSTSGRWVLNNEHYRALSGVFCGVDAMNLIANIFTPLVQPVGALDVSASVVAGGIIAILVTCAAYYFMKFRRVFGEYNHVVAANALLFLMSFTILCLVPAYSFLPGVYSVFYLYLTFYFTNDVSFLAHLQWFAMFSPIVPFWITAIYVFCISLKHCHWFFNNYLRKRVMFNGVTFSTFEEAALCTFLLNKEMYLKLRSETLLPLTQYNRYLALYNKYKYFSGALDTTSYREAACCHLAKALNDFSNSGADVLYQPPQTSITSAVLQSGFRKMAFPSGKVEGCMVQVTCGTTTLNGLWLDDTVYCPRHVICTAEDMLNPNYEDLLIRKSNHSFLVQAGNVQLRVIGHSMQNCLLRLKVDTSNPKTPKYKFVRIQPGQTFSVLACYNGSPSGVYQCAMRPNHTIKGSFLNGSCGSVGFNIDYDCVSFCYMHHMELPTGVHAGTDLEGKFYGPFVDRQTAQAAGTDTTITLNVLAWLYAAVINGDRWFLNRFTTTLNDFNLVAMKYNYEPLTQDHVDILGPLSAQTGIAVLDMCAALKELLQNGMNGRTILGSTILEDEFTPFDVVRQCSGVTFQGKFKKIVKGTHHWMLLTFLTSLLILVQSTQWSLFFFVYENAFLPFTLGIMAIAACAMLLVKHKHAFLCLFLLPSLATVAYFNMVYMPASWVMRIMTWLELADTSLSGYRLKDCVMYASALVLLILMTARTVYDDAARRVWTLMNVITLVYKVYYGNALDQAISMWALVISVTSNYSGVVTTIMFLARAIVFVCVEYYPLLFITGNTLQCIMLVYCFLGYCCCCYFGLFCLLNRYFRLTLGVYDYLVSTQEFRYMNSQGLLPPKSSIDAFKLNIKLLGIGGKPCIKVATVQSKMSDVKCTSVVLLSVLQQLRVESSSKLWAQCVQLHNDILLAKDTTEAFEKMVSLLSVLLSMQGAVDINRLCEEMLDNRATLQAIASEFSSLPSYAAYATAQEAYEQAVANGDSEVVLKKLKKSLNVAKSEFDRDAAMQRKLEKMADQAMTQMYKQARSEDKRAKVTSAMQTMLFTMLRKLDNDALNNIINNARDGCVPLNIIPLTTAAKLMVVVPDYGTYKNTCDGNTFTYASALWEIQQVVDADSKIVQLSEINMDNSPNLAWPLIVTALRANSAVKLQNNELSPVALRQMSCAAGTTQTACTDDNALAYYNNSKGGRFVLALLSDHQDLKWARFPKSDGTGTIYTELEPPCRFVTDTPKGPKVKYLYFIKGLNNLNRGMVLGSLAATVRLQAGNATEVPANSTVLSFCAFAVDPAKAYKDYLASGGQPITNCVKMLCTHTGTGQAITVTPEANMDQESFGGASCCLYCRCHIDHPNPKGFCDLKGKYVQIPTTCANDPVGFTLRNTVCTVCGMWKGYGCSCDQLREPLMQSADASTXXXXXXGVSAARLTPCGTGTSTDVVYRAFDIYNEKVAGFAKFLKTNCCRFQEKDEEGNLLDSYFVVKRHTMSNYQHEETIYNLVKDCPAVAVHDFFKFRVDGDMVPHISRQRLTKYTMADLVYALRHFDEGNCDTLKEILVTYNCCDDDYFNKKDWYDFVENPDILRVYANLGERVRQSLLKTVQFCDAMRDAGIVGVLTLDNQDLNGNWYDFGDFVQVAPGCGVPIVDSYYSLLMPILTLTRALAAESHMDADLAKPLIKWDLLKYDFTEERLCLFDRYFKYWDQTYHPNCINCLDDRCILHCANFNVLFSTVFPPTSFGPLVRKIFVDGVPFVVSTGYHFRELGVVHNQDVNLHSSRLSFKELLVYAADPAMHAASGNLLLDKRTTCFSVAALTNNVAFQTVKPGNFNKDFYDFAVSKGFFKEGSSVELKHFFFAQDGNAAISDYDYYRYNLPTMCDIRQLLFVVEVVDKYFDCYDGGCINANQVIVNNLDKSAGFPFNKWGKARLYYDSMSYEDQDALFAYTKRNVIPTITQMNLKYAISAKNRARTVAGVSICSTMTNRQFHQKLLKSIAATRGATVVIGTSKFYGGWHNMLKTVYSDVETPHLMGWDYPKCDRAMPNMLRIMASLVLARKHNTCCNLSHRFYRLANECAQVLSEMVMCGGSLYVKPGGTSSGDATTAYANSVFNICQAVTANVNALLSTDGNKIADKYVRNLQHRLYECLYRNRDVDHEFVDEFYAYLRKHFSMMILSDDAVVCYNSNYAAQGLVASIKNFKAVLYYQNNVFMSEAKCWTETDLTKGPHEFCSQHTMLVKQGDDYVYLPYPDPSRILGAGCFVDDIVKTDGTLMIERFVSLAIDAYPLTKHPNQEYADVFHLYLQYIRKLHDELTGHMLDMYSVMLTNDNTSRYWEPEFYEAMYTPHTVLQAVGACVLCNSQTSLRCGACIRRPFLCCKCCYDHVISTSHKLVLSVNPYVCNAPGCDVTDVTQLYLGGMSYYCKSHKPPISFPLCANGQVFGLYKNTCVGSDNVTDFNAIATCDWTNAGDYILANTCTERLKLFAAETLKATEETFKLSYGIATVREVLSDRELHLSWEVGKPRPPLNRNYVFTGYRVTKNSKVQIGEYTFEKGDYGDAVVYRGTTTYKLNVGDYFVLTSHTVMPLSAPTLVPQEHYVRITGLYPTLNISDEFSSNVANYQKVGMQKYSTLQGPPGTGKSHFAIGLALYYPSARIVYTACSHAAVDALCEKALKYLPIDKCSRIIPARARVECFDKFKVNSTLEQYVFCTVNALPETTADIVVFDEISMATNYDLSVVNARLRAKHYVYIGDPAQLPAPRTLLTKGTLEPEYFNSVCRLMKTIGPDMFLGTCRRCPAEIVDTVSALVYDNKLKAHKDKSAQCFKMFYKGVITHDVSSAINRPQIGVVREFLTRNPAWRKAVFISPYNSQNAVASKILGLPTQTVDSSQGSEYDYVIFTQTTETAHSCNVNRFNVAITRAKIGILCIMSDRDLYDKLQFTSLEIPRRNVATLQAENVTGLFKDCSKIITGLHPTQAPTHLSVDIKFKTEGLCVDIPGIPKDMTYRRLISMMGFKMNYQVNGYPNMFITREEAIRHVRAWIGFDVEGCHATRDAVGTNLPLQLGFSTGVNLVAVPTGYVDTENNTEFTRVNAKPPPGDQFKHLIPLMYKGLPWNVVRIKIVQMLSDTLKGLSDRVVFVLWAHGFELTSMKYFVKIGPERTCCLCDKRATCFSTSSDTYACWNHSVGFDYVYNPFMIDVQQWGFTGNLQSNHDQHCQVHGNAHVASCDAIMTRCLAVHECFVKRVDWSVEYPIIGDELRVNSACRKVQHMVVKSALLADKFPVLHDIGNPKAIKCVPQAEVEWKFYDAQPCSDKAYKIEELFYSYATHHDKFTDGVCLFWNCNVDRYPANAIVCRFDTRVLSNLNLPGCDGGSLYVNKHAFHTPAFDKSAFTNLKQLPFFYYSDSPCESHGKQVVSDIDYVPLKSATCITRCNLGGAVCRHHANEYRQYLDAYNMMISAGFSLWIYKQFDTYNLWNTFTRLQSLENVAYNVVNKGHFDGHAGEAPVSIINNAVYTKVDGIDVEIFENKTTLPVNVAFELWAKRNIKPVPEIKILNNLGVDIAANTVIWDYKREAPAHVSTIGVCTMTDIAKKPTESACSSLTVLFDGRVEGQVDLFRNARNGVLITEGSVKGLTPSKGPAQASVNGVTLIGESVKTQFNYFKKVDGIIQQLPETYFTQSRDLEDFKPRSQMETDFLELAMDEFIQRYKLEGYAFEHIVYGDFSHGQLGGLHLMIGLAKRSQDSPLKLEDFIPMDSTVKNYFITDAQTGSSKCVCSVIDLLLDDFVEIIKSQDLSVISKVVKVTIDYAEISFMLWCKDGHVETFYPKLQASRAWQPGVAMPNLYKMQRMLLEKCDLQNYGENAVIPKGIMMNVAKYTQLCQYLNTLTLAVPYNMRVIHFGAGSDKGVAPGTAVLRQWLPTGTLLVDSDLNDFVSDAYSTLIGDCATVHTANKWDLIISDMYDPRTKHVTKENDSKEGFFTYLCGFIKQKLALGGSIAVKITEHSWNADLYKLMGHFSWWTAFVTNVNASSSEAFLIGANYLGKPKEQIDGYTMHANYIFWRNTNPIQLSSYSLFDMSKFPLKLRGTAVMSLKENQINDMIYSLLEKGRLIIRENNRVVVSSDILVNN

SEQ ID NO: 7241 - protein, 7074 aa, SARS coronavirus
  misc_feature 4376...4382: Xaa is any amino acid
MESLVLGVNEKTHVQLSLPVLQVRDVLVRGFGDSVEEALSEAREHLKNGTCGLVELEKGVLPQLEQPYVFIKRSDALSTNHGHKVVELVAEMDGIQYGRSGITLGVLVPHVGETPIAYRNVLLRKNGNKGAGGHSYGIDLKSYDLGDELGTDPIEDYEQNWNTKHGSGALRELTRELNGGAVTRYVDNNFCGPDGYPLDCIKDFLARAGKSMCTLSEQLDYIESKRGVYCCRDHEHEIAWFTERSDKSYEHQTPFEIKSAKKFDTFKGECPKFVFPLNSKVKVIQPRVEKKKTEGFMGRIRSVYPVASPQECNNMHLSTLMKCNHCDEVSWQTCDFLKATCEHCGTENLVIEGPTTCGYLPTNAVVKMPCPACQDPEIGPEHSVADYHNHSNIETRLRKGGRTRCFGGCVFAYVGCYNKRAYWVPRASADIGSGHTGITGDNVETLNEDLLEILSRERVNINIVGDFHLNEEVAIILASFSASTSAFIDTIKSLDYKSFKTIVESCGNYKVTKGKPVKGAWNIGQQRSVLTPLCGFPSQAAGVIRSIFARTLDAANHSIPDLQRAAVTILDGISEQSLRLVDAMVYTSDLLTNSVIIMAYVTGGLVQQTSQWLSNLLGTTVEKLRPIFEWIEAKLSAGVEFLKDAWEILKFLITGVFDIVKGQIQVASDNIKDCVKCFIDVVNKALEMCIDQVTIAGAKLRSLNLGEVFIAQSKGLYRQCIRGKEQLQLLMPLKAPKEVTFLEGDSHDTVLTSEEVVLKNGELEALETPVDSFTNGAIVGTPVCVNGLMLLEIKDKEQYCALSPGLLATNNVFRLKGGAPIKGVTFGEDTVWEVQGYKNVRITFELDERVDKVLNEKCSVYTVESGTEVTEFACVVAEAVVKTLQPVSDLLTNMGIDLDEWSVATFYLFDDAGEENFSSRMYCSFYPPDEEEEDDAECEEEEIDETCEHEYGTEDDYQGLPLEFGASAETVRVEEEEEEDWLDDTTEQSEIEPEPEPTPEEPVNQFTGYLKLTDNVAIKCVDIVKEAQSANPMVIVNAANIHLKHGGGVAGALNKATNGAMQKESDDYIKLNGPLTVGGSCLLSGHNLAKKCLHVVGPNLNAGEDIQLLKAAYENFNSQDILLAPLLSAGIFGAKPLQSLQVCVQTVRTQVYIAVNDKALYEQVVMDYLDNLKPRVEAPKQEEPPNTEDSKTEEKSVVQKPVDVKPKIKACIDEVTTTLEETKFLTNKLLLFADINGKLYHDSQNMLRGEDMSFLEKDAPYMVGDVITSGDITCVVIPSKKAGGTTEMLSRALKKVPVDEYITTYPGQGCAGYTLEEAKTALKKCKSAFYVLPSEAPNAKEEILGTVSWNLREMLAHAEETRKLMPICMDVRAIMATIQRKYKGIKIQEGIVDYGVRFFFYTSKEPVASIITKLNSLNEPLVTMPIGYVTHGFNLEEAARCMRSLKAPAVVSVSSPDAVTTYNGYLTSSSKTSEEHFVETVSLAGSYRDWSYSGQRTELGVEFLKRGDKIVYHTLESPVEFHLDGEVLSLDKLKSLLSLREVKTIKVFTTVDNTNLHTQLVDMSMTYGQQFGPTYLDGADVTKIKPHVNHEGKTFFVLPSDDTLRSEAFEYYHTLDESFLGRYMSALNHTKKWKFPQVGGLTSIKWADNNCYLSSVLLALQQLEVKFNAPALQEAYYRARAGDAANFCALILAYSNKTVGELGDVRETMTHLLQHANLESAKRVLNVVCKHCGQKTTTLTGVEAVMYMGTLSYDNLKTGVSIPCVCGRDATQYLVQQESSFVMMSAPPAEYKLQQGTFLCANEYTGNYQCGHYTHITAKETLYRIDGAHLTKMSEYKGPVTDVFYKETSYTTTIKPVSYKLDGVTYTEIEPKLDGYYKKDNAYYTEQPIDLVPTQPLPNASFDNFKLTCSNTKFADDLNQMTGFTKPASRELSVTFFPDLNGDVVAIDYRHYSASFKKGAKLLHKPIVWHINQATTKTTFKPNTWCLRCLWSTKPVDTSNSFEVLAVEDTQGMDNLACESQQPTSEEVVENPTIQKEVIECDVKTTEVVGNVILKPSDEGVKVTQELGHEDLMAAYVENTSITIKKPNELSLALGLKTIATHGIAAINSVPWSKILAYVKPFLGQAAITTSNCAKRLAQRVFNNYMPYVFTLLFQLCTFTKSTNSRIRASLPTTIAKNSVKSVAKLCLDAGINYVKSPKFSKLFTIAMWLLLLSICLGSLICVTAAFGVLLSNFGAPSYCNGVRELYLNSSNVTTMDFCEGSFPCSICLSGLDSLDSYPALETIQVTISSYKLDLTILGLAAEWVLAYMLFTKFFYLLGLSAIMQVFFGYFASHFISNSWLMWFIISIVQMAPVSAMVRMYIFFASFYYIWKSYVHIMDGCTSSTCMMCYKRNRATRVECTTIVNGMKRSFYVYANGGRGFCKTHNWNCLNCDTFCTGSTFISDEVARDLSLQFKRPINPTDQSSYIVDSVAVKNGALHLYFDKAGQKTYERHPLSHFVNLDNLRANNTKGSLPINVIVFDGKSKCDESASKSASVYYSQLMCQPILLLDQALVSDVGDSTEVSVKMFDAYVDTFSATFSVPMEKLKALVATAHSELAKGVALDGVLSTFVSAARQGVVDTDVDTKDVIECLKLSHHSDLEVTGDSCNNFMLTYNKVENMTPRDLGACIDCNARHINAQVAKSHNVSLIWNVKDYMSLSEQLRKQIRSAAKKNNIPFRLTCATTRQVVNVITTKISLKGGKIVSTCFKLMLKATLLCVLAALVCYIVMPVHTLSIHDGYTNEIIGYKAIQDGVTRDIISTDDCFANKHAGFDAWFSQRGGSYKNDKSCPVVAAIITREIGFIVPGLPGTVLRAINGDFLHFLPRVFSAVGNICYTPSKLIEYSDFATSACVLAAECTIFKDAMGKPVPYCYDTNLLEGSISYSELRPDTRYVLMDGSIIQFPNTYLEGSVRVVTTFDAEYCRHGTCERSEVGICLSTSGRWVLNNEHYRALSGVFCGVDAMNLIANIFTPLVQPVGALDVSASVVAGGIIAILVTCAAYYFMKFRRVFGEYNHVVAANALLFLMSFTILCLVPAYSFLPGVYSVFYLYLTFYFTNDVSFLAHLQWFAMFSPIVPFWITAIYVFCISLKHCHWFFNNYLRKRVMFNGVTFSTFEEAALCTFLLNKEMYLKLRSETLLPLTQYNRYLALYNKYKYFSGALDTTSYREAACCHLAKALNDFSNSGADVLYQPPQTSITSAVLQSGFRKMAFPSGKVEGCMVQVTCGTTTLNGLWLDDTVYCPRHVICTAEDMLNPNYEDLLIRKSNHSFLVQAGNVQLRVIGHSMQNCLLRLKVDTSNPKTPKYKFVRIQPGQTFSVLACYNGSPSGVYQCAMRPNHTIKGSFLNGSCGSVGFNIDYDCVSFCYMHHMELPTGVHAGTDLEGKFYGPFVDRQTAQAAGTDTTITLNVLAWLYAAVINGDRWFLNRFTTTLNDFNLVAMKYNYEPLTQDHVDILGPLSAQTGIAVLDMCAALKELLQNGMNGRTILGSTILEDEFTPFDVVRQCSGVTFQGKFKKIVKGTHHWMLLTFLTSLLILVQSTQWSLFFFVYENAFLPFTLGIMAIAACAMLLVKHKHAFLCLFLLPSLATVAYFNMVYMPASWVMRIMTWLELADTSLSGYRLKDCVMYASALVLLILMTARTVYDDAARRVWTLMNVITLVYKVYYGNALDQAISMWALVISVTSNYSGVVTTIMFLARAIVFVCVEYYPLLFITGNTLQCIMLVYCFLGYCCCCYFGLFCLLNRYFRLTLGVYDYLVSTQEFRYMNSQGLLPPKSSIDAFKLNIKLLGIGGKPCIKVATVQSKMSDVKCTSVVLLSVLQQLRVESSSKLWAQCVQLHNDILLAKDTTEAFEKMVSLLSVLLSMQGAVDINRLCEEMLDNRATLQAIASEFSSLPSYAAYATAQEAYEQAVANGDSEVVLKKLKKSLNVAKSEFDRDAAMQRKLEKMADQAMTQMYKQARSEDKRAKVTSAMQTMLFTMLRKLDNDALNNIINNARDGCVPLNIIPLTTAAKLMVVVPDYGTYKNTCDGNTFTYASALWEIQQVVDADSKIVQLSEINMDNSPNLAWPLIVTALRANSAVKLQNNELSPVALRQMSCAAGTTQTACTDDNALAYYNNSKGGRFVLALLSDHQDLKWARFPKSDGTGTIYTELEPPCRFVTDTPKGPKVKYLYFIKGLNNLNRGMVLGSLAATVRLQAGNATEVPANSTVLSFCAFAVDPAKAYKDYLASGGQPITNCVKMLCTHTGTGQAITVTPEANMDQESFGGASCCLYCRCHIDHPNPKGFCDLKGKYVQIPTTCANDPVGFTLRNTVCTVCGMWKGYGCSCDQLREPLMQSADASTXXXXXXXGVSAARLTPCGTGTSTDVVYRAFDIYNEKVAGFAKFLKTNCCRFQEKDEEGNLLDSYFVVKRHTMSNYQHEETIYNLVKDCPAVAVHDFFKFRVDGDMVPHISRQRLTKYTMADLVYALRHFDEGNCDTLKEILVTYNCCDDDYFNKKDWYDFVENPDILRVYANLGERVRQSLLKTVQFCDAMRDAGIVGVLTLDNQDLNGNWYDFGDFVQVAPGCGVPIVDSYYSLLMPILTLTRALAAESHMDADLAKPLIKWDLLKYDFTEERLCLFDRYFKYWDQTYHPNCINCLDDRCILHCANFNVLFSTVFPPTSFGPLVRKIFVDGVPFVVSTGYHFRELGVVHNQDVNLHSSRLSFKELLVYAADPAMHAASGNLLLDKRTTCFSVAALTNNVAFQTVKPGNFNKDFYDFAVSKGFFKEGSSVELKHFFFAQDGNAAISDYDYYRYNLPTMCDIRQLLFVVEVVDKYFDCYDGGCINANQVIVNNLDKSAGFPFNKWGKARLYYDSMSYEDQDALFAYTKRNVIPTITQMNLKYAISAKNRARTVAGVSICSTMTNRQFHQKLLKSIAATRGATVVIGTSKFYGGWHNMLKTVYSDVETPHLMGWDYPKCDRAMPNMLRIMASLVLARKHNTCCNLSHRFYRLANECAQVLSEMVMCGGSLYVKPGGTSSGDATTAYANSVFNICQAVTANVNALLSTDGNKIADKYVRNLQHRLYECLYRNRDVDHEFVDEFYAYLRKHFSMMILSDDAVVCYNSNYAAQGLVASIKNFKAVLYYQNNVFMSEAKCWTETDLTKGPHEFCSQHTMLVKQGDDYVYLPYPDPSRILGAGCFVDDIVKTDGTLMIERFVSLAIDAYPLTKHPNQEYADVFHLYLQYIRKLHDELTGHMLDMYSVMLTNDNTSRYWEPEFYEAMYTPHTVLQAVGACVLCNSQTSLRCGACIRRPFLCCKCCYDHVISTSHKLVLSVNPYVCNAPGCDVTDVTQLYLGGMSYYCKSHKPPISFPLCANGQVFGLYKNTCVGSDNVTDFNAIATCDWTNAGDYILANTCTERLKLFAAETLKATEETFKLSYGIATVREVLSDRELHLSWEVGKPRPPLNRNYVFTGYRVTKNSKVQIGEYTFEKGDYGDAVVYRGTTTYKLNVGDYFVLTSHTVMPLSAPTLVPQEHYVRITGLYPTLNISDEFSSNVANYQKVGMQKYSTLQGPPGTGKSHFAIGLALYYPSARIVYTACSHAAVDALCEKALKYLPIDKCSRIIPARARVECFDKFKVNSTLEQYVFCTVNALPETTADIVVFDEISMATNYDLSVVNARLRAKHYVYIGDPAQLPAPRTLLTKGTLEPEYFNSVCRLMKTIGPDMFLGTCRRCPAEIVDTVSALVYDNKLKAHKDKSAQCFKMFYKGVITHDVSSAINRPQIGVVREFLTRNPAWRKAVFISPYNSQNAVASKILGLPTQTVDSSQGSEYDYVIFTQTTETAHSCNVNRFNVAITRAKIGILCIMSDRDLYDKLQFTSLEIPRRNVATLQAENVTGLFKDCSKIITGLHPTQAPTHLSVDIKFKTEGLCVDIPGIPKDMTYRRLISMMGFKMNYQVNGYPNMFITREEAIRHVRAWIGFDVEGCHATRDAVGTNLPLQLGFSTGVNLVAVPTGYVDTENNTEFTRVNAKPPPGDQFKHLIPLMYKGLPWNVVRIKIVQMLSDTLKGLSDRVVFVLWAHGFELTSMKYFVKIGPERTCCLCDKRATCFSTSSDTYACWNHSVGFDYVYNPFMIDVQQWGFTGNLQSNHDQHCQVHGNAHVASCDAIMTRCLAVHECFVKRVDWSVEYPIIGDELRVNSACRKVQHMVVKSALLADKFPVLHDIGNPKAIKCVPQAEVEWKFYDAQPCSDKAYKIEELFYSYATHHDKFTDGVCLFWNCNVDRYPANAIVCRFDTRVLSNLNLPGCDGGSLYVNKHAFHTPAFDKSAFTNLKQLPFFYYSDSPCESHGKQVVSDIDYVPLKSATCITRCNLGGAVCRHHANEYRQYLDAYNMMISAGFSLWIYKQFDTYNLWNTFTRLQSLENVAYNVVNKGHFDGHAGEAPVSIINNAVYTKVDGIDVEIFENKTTLPVNVAFELWAKRNIKPVPEIKILNNLGVDIAANTVIWDYKREAPAHVSTIGVCTMTDIAKKPTESACSSLTVLFDGRVEGQVDLFRNARNGVLITEGSVKGLTPSKGPAQASVNGVTLIGESVKTQFNYFKKVDGIIQQLPETYFTQSRDLEDFKPRSQMETDFLELAMDEFIQRYKLEGYAFEHIVYGDFSHGQLGGLHLMIGLAKRSQDSPLKLEDFIPMDSTVKNYFITDAQTGSSKCVCSVIDLLLDDFVEIIKSQDLSVISKVVKVTIDYAEISFMLWCKDGHVETFYPKLQASRAWQPGVAMPNLYKMQRMLLEKCDLQNYGENAVIPKGIMMNVAKYTQLCQYLNTLTLAVPYNMRVIHFGAGSDKGVAPGTAVLRQWLPTGTLLVDSDLNDFVSDAYSTLIGDCATVHTANKWDLIISDMYDPRTKHVTKENDSKEGFFTYLCGFIKQKLALGGSIAVKITEHSWNADLYKLMGHFSWWTAFVTNVNASSSEAFLIGANYLGKPKEQIDGYTMHANYIFWRNTNPIQLSSYSLFDMSKFPLKLRGTAVMSLKENQINDMIYSLLEKGRLIIRENNRVVVSSDILVNN

SEQ ID NO: 7242 - protein, 7075 aa, SARS coronavirus
  misc_feature 4376...4383: Xaa is any amino acid
MESLVLGVNEKTHVQLSLPVLQVRDVLVRGFGDSVEEALSEAREHLKNGTCGLVELEKGVLPQLEQPYVFIKRSDALSTNHGHKVVELVAEMDGIQYGRSGITLGVLVPHVGETPIAYRNVLLRKNGNKGAGGHSYGIDLKSYDLGDELGTDPIEDYEQNWNTKHGSGALRELTRELNGGAVTRYVDNNFCGPDGYPLDCIKDFLARAGKSMCTLSEQLDYIESKRGVYCCRDHEHEIAWFTERSDKSYEHQTPFEIKSAKKFDTFKGECPKFVFPLNSKVKVIQPRVEKKKTEGFMGRIRSVYPVASPQECNNMHLSTLMKCNHCDEVSWQTCDFLKATCEHCGTENLVIEGPTTCGYLPTNAVVKMPCPACQDPEIGPEHSVADYHNHSNIETRLRKGGRTRCFGGCVFAYVGCYNKRAYWVPRASADIGSGHTGITGDNVETLNEDLLEILSRERVNINIVGDFHLNEEVAIILASFSASTSAFIDTIKSLDYKSFKTIVESCGNYKVTKGKPVKGAWNIGQQRSVLTPLCGFPSQAAGVIRSIFARTLDAANHSIPDLQRAAVTILDGISEQSLRLVDAMVYTSDLLTNSVIIMAYVTGGLVQQTSQWLSNLLGTTVEKLRPIFEWIEAKLSAGVEFLKDAWEILKFLITGVFDIVKGQIQVASDNIKDCVKCFIDVVNKALEMCIDQVTIAGAKLRSLNLGEVFIAQSKGLYRQCIRGKEQLQLLMPLKAPKEVTFLEGDSHDTVLTSEEVVLKNGELEALETPVDSFTNGAIVGTPVCVNGLMLLEIKDKEQYCALSPGLLATNNVFRLKGGAPIKGVTFGEDTVWEVQGYKNVRITFELDERVDKVLNEKCSVYTVESGTEVTEFACVVAEAVVKTLQPVSDLLTNMGIDLDEWSVATFYLFDDAGEENFSSRMYCSFYPPDEEEEDDAECEEEEIDETCEHEYGTEDDYQGLPLEFGASAETVRVEEEEEEDWLDDTTEQSEIEPEPEPTPEEPVNQFTGYLKLTDNVAIKCVDIVKEAQSANPMVIVNAANIHLKHGGGVAGALNKATNGAMQKESDDYIKLNGPLTVGGSCLLSGHNLAKKCLHVVGPNLNAGEDIQLLKAAYENFNSQDILLAPLLSAGIFGAKPLQSLQVCVQTVRTQVYIAVNDKALYEQVVMDYLDNLKPRVEAPKQEEPPNTEDSKTEEKSVVQKPVDVKPKIKACIDEVTTTLEETKFLTNKLLLFADINGKLYHDSQNMLRGEDMSFLEKDAPYMVGDVITSGDITCVVIPSKKAGGTTEMLSRALKKVPVDEYITTYPGQGCAGYTLEEAKTALKKCKSAFYVLPSEAPNAKEEILGTVSWNLREMLAHAEETRKLMPICMDVRAIMATIQRKYKGIKIQEGIVDYGVRFFFYTSKEPVASIITKLNSLNEPLVTMPIGYVTHGFNLEEAARCMRSLKAPAVVSVSSPDAVTTYNGYLTSSSKTSEEHFVETVSLAGSYRDWSYSGQRTELGVEFLKRGDKIVYHTLESPVEFHLDGEVLSLDKLKSLLSLREVKTIKVFTTVDNTNLHTQLVDMSMTYGQQFGPTYLDGADVTKIKPHVNHEGKTFFVLPSDDTLRSEAFEYYHTLDESFLGRYMSALNHTKKWKFPQVGGLTSIKWADNNCYLSSVLLALQQLEVKFNAPALQEAYYRARAGDAANFCALILAYSNKTVGELGDVRETMTHLLQHANLESAKRVLNVVCKHCGQKTTTLTGVEAVMYMGTLSYDNLKTGVSIPCVCGRDATQYLVQQESSFVMMSAPPAEYKLQQGTFLCANEYTGNYQCGHYTHITAKETLYRIDGAHLTKMSEYKGPVTDVFYKETSYTTTIKPVSYKLDGVTYTEIEPKLDGYYKKDNAYYTEQPIDLVPTQPLPNASFDNFKLTCSNTKFADDLNQMTGFTKPASRELSVTFFPDLNGDVVAIDYRHYSASFKKGAKLLHKPIVWHINQATTKTTFKPNTWCLRCLWSTKPVDTSNSFEVLAVEDTQGMDNLACESQQPTSEEVVENPTIQKEVIECDVKTTEVVGNVILKPSDEGVKVTQELGHEDLMAAYVENTSITIKKPNELSLALGLKTIATHGIAAINSVPWSKILAYVKPFLGQAAITTSNCAKRLAQRVFNNYMPYVFTLLFQLCTFTKSTNSRIRASLPTTIAKNSVKSVAKLCLDAGINYVKSPKFSKLFTIAMWLLLLSICLGSLICVTAAFGVLLSNFGAPSYCNGVRELYLNSSNVTTMDFCEGSFPCSICLSGLDSLDSYPALETIQVTISSYKLDLTILGLAAEWVLAYMLFTKFFYLLGLSAIMQVFFGYFASHFISNSWLMWFIISIVQMAPVSAMVRMYIFFASFYYIWKSYVHIMDGCTSSTCMMCYKRNRATRVECTTIVNGMKRSFYVYANGGRGFCKTHNWNCLNCDTFCTGSTFISDEVARDLSLQFKRPINPTDQSSYIVDSVAVKNGALHLYFDKAGQKTYERHPLSHFVNLDNLRANNTKGSLPINVIVFDGKSKCDESASKSASVYYSQLMCQPILLLDQALVSDVGDSTEVSVKMFDAYVDTFSATFSVPMEKLKALVATAHSELAKGVALDGVLSTFVSAARQGVVDTDVDTKDVIECLKLSHHSDLEVTGDSCNNFMLTYNKVENMTPRDLGACIDCNARHINAQVAKSHNVSLIWNVKDYMSLSEQLRKQIRSAAKKNNIPFRLTCATTRQVVNVITTKISLKGGKIVSTCFKLMLKATLLCVLAALVCYIVMPVHTLSIHDGYTNEIIGYKAIQDGVTRDIISTDDCFANKHAGFDAWFSQRGGSYKNDKSCPVVAAIITREIGFIVPGLPGTVLRAINGDFLHFLPRVFSAVGNICYTPSKLIEYSDFATSACVLAAECTIFKDAMGKPVPYCYDTNLLEGSISYSELRPDTRYVLMDGSIIQFPNTYLEGSVRVVTTFDAEYCRHGTCERSEVGICLSTSGRWVLNNEHYRALSGVFCGVDAMNLIANIFTPLVQPVGALDVSASVVAGGIIAILVTCAAYYFMKFRRVFGEYNHVVAANALLFLMSFTILCLVPAYSFLPGVYSVFYLYLTFYFTNDVSFLAHLQWFAMFSPIVPFWITAIYVFCISLKHCHWFFNNYLRKRVMFNGVTFSTFEEAALCTFLLNKEMYLKLRSETLLPLTQYNRYLALYNKYKYFSGALDTTSYREAACCHLAKALNDFSNSGADVLYQPPQTSITSAVLQSGFRKMAFPSGKVEGCMVQVTCGTTTLNGLWLDDTVYCPRHVICTAEDMLNPNYEDLLIRKSNHSFLVQAGNVQLRVIGHSMQNCLLRLKVDTSNPKTPKYKFVRIQPGQTFSVLACYNGSPSGVYQCAMRPNHTIKGSFLNGSCGSVGFNIDYDCVSFCYMHHMELPTGVHAGTDLEGKFYGPFVDRQTAQAAGTDTTITLNVLAWLYAAVINGDRWFLNRFTTTLNDFNLVAMKYNYEPLTQDHVDILGPLSAQTGIAVLDMCAALKELLQNGMNGRTILGSTILEDEFTPFDVVRQCSGVTFQGKFKKIVKGTHHWMLLTFLTSLLILVQSTQWSLFFFVYENAFLPFTLGIMAIAACAMLLVKHKHAFLCLFLLPSLATVAYFNMVYMPASWVMRIMTWLELADTSLSGYRLKDCVMYASALVLLILMTARTVYDDAARRVWTLMNVITLVYKVYYGNALDQAISMWALVISVTSNYSGVVTTIMFLARAIVFVCVEYYPLLFITGNTLQCIMLVYCFLGYCCCCYFGLFCLLNRYFRLTLGVYDYLVSTQEFRYMNSQGLLPPKSSIDAFKLNIKLLGIGGKPCIKVATVQSKMSDVKCTSVVLLSVLQQLRVESSSKLWAQCVQLHNDILLAKDTTEAFEKMVSLLSVLLSMQGAVDINRLCEEMLDNRATLQAIASEFSSLPSYAAYATAQEAYEQAVANGDSEVVLKKLKKSLNVAKSEFDRDAAMQRKLEKMADQAMTQMYKQARSEDKRAKVTSAMQTMLFTMLRKLDNDALNNIINNARDGCVPLNIIPLTTAAKLMVVVPDYGTYKNTCDGNTFTYASALWEIQQVVDADSKIVQLSEINMDNSPNLAWPLIVTALRANSAVKLQNNELSPVALRQMSCAAGTTQTACTDDNALAYYNNSKGGRFVLALLSDHQDLKWARFPKSDGTGTIYTELEPPCRFVTDTPKGPKVKYLYFIKGLNNLNRGMVLGSLAATVRLQAGNATEVPANSTVLSFCAFAVDPAKAYKDYLASGGQPITNCVKMLCTHTGTGQAITVTPEANMDQESFGGASCCLYCRCHIDHPNPKGFCDLKGKYVQIPTTCANDPVGFTLRNTVCTVCGMWKGYGCSCDQLREPLMQSADASTXXXXXXXXGVSAARLTPCGTGTSTDVVYRAFDIYNEKVAGFAKFLKTNCCRFQEKDEEGNLLDSYFVVKRHTMSNYQHEETIYNLVKDCPAVAVHDFFKFRVDGDMVPHISRQRLTKYTMADLVYALRHFDEGNCDTLKEILVTYNCCDDDYFNKKDWYDFVENPDILRVYANLGERVRQSLLKTVQFCDAMRDAGIVGVLTLDNQDLNGNWYDFGDFVQVAPGCGVPIVDSYYSLLMPILTLTRALAAESHMDADLAKPLIKWDLLKYDFTEERLCLFDRYFKYWDQTYHPNCINCLDDRCILHCANFNVLFSTVFPPTSFGPLVRKIFVDGVPFVVSTGYHFRELGVVHNQDVNLHSSRLSFKELLVYAADPAMHAASGNLLLDKRTTCFSVAALTNNVAFQTVKPGNFNKDFYDFAVSKGFFKEGSSVELKHFFFAQDGNAAISDYDYYRYNLPTMCDIRQLLFVVEVVDKYFDCYDGGCINANQVIVNNLDKSAGFPFNKWGKARLYYDSMSYEDQDALFAYTKRNVIPTITQMNLKYAISAKNRARTVAGVSICSTMTNRQFHQKLLKSIAATRGATVVIGTSKFYGGWHNMLKTVYSDVETPHLMGWDYPKCDRAMPNMLRIMASLVLARKHNTCCNLSHRFYRLANECAQVLSEMVMCGGSLYVKPGGTSSGDATTAYANSVFNICQAVTANVNALLSTDGNKIADKYVRNLQHRLYECLYRNRDVDHEFVDEFYAYLRKHFSMMILSDDAVVCYNSNYAAQGLVASIKNFKAVLYYQNNVFMSEAKCWTETDLTKGPHEFCSQHTMLVKQGDDYVYLPYPDPSRILGAGCFVDDIVKTDGTLMIERFVSLAIDAYPLTKHPNQEYADVFHLYLQYIRKLHDELTGHMLDMYSVMLTNDNTSRYWEPEFYEAMYTPHTVLQAVGACVLCNSQTSLRCGACIRRPFLCCKCCYDHVISTSHKLVLSVNPYVCNAPGCDVTDVTQLYLGGMSYYCKSHKPPISFPLCANGQVFGLYKNTCVGSDNVTDFNAIATCDWTNAGDYILANTCTERLKLFAAETLKATEETFKLSYGIATVREVLSDRELHLSWEVGKPRPPLNRNYVFTGYRVTKNSKVQIGEYTFEKGDYGDAVVYRGTTTYKLNVGDYFVLTSHTVMPLSAPTLVPQEHYVRITGLYPTLNISDEFSSNVANYQKVGMQKYSTLQGPPGTGKSHFAIGLALYYPSARIVYTACSHAAVDALCEKALKYLPIDKCSRIIPARARVECFDKFKVNSTLEQYVFCTVNALPETTADIVVFDEISMATNYDLSVVNARLRAKHYVYIGDPAQLPAPRTLLTKGTLEPEYFNSVCRLMKTIGPDMFLGTCRRCPAEIVDTVSALVYDNKLKAHKDKSAQCFKMFYKGVITHDVSSAINRPQIGVVREFLTRNPAWRKAVFISPYNSQNAVASKILGLPTQTVDSSQGSEYDYVIFTQTTETAHSCNVNRFNVAITRAKIGILCIMSDRDLYDKLQFTSLEIPRRNVATLQAENVTGLFKDCSKIITGLHPTQAPTHLSVDIKFKTEGLCVDIPGIPKDMTYRRLISMMGFKMNYQVNGYPNMFITREEAIRHVRAWIGFDVEGCHATRDAVGTNLPLQLGFSTGVNLVAVPTGYVDTENNTEFTRVNAKPPPGDQFKHLIPLMYKGLPWNVVRIKIVQMLSDTLKGLSDRVVFVLWAHGFELTSMKYFVKIGPERTCCLCDKRATCFSTSSDTYACWNHSVGFDYVYNPFMIDVQQWGFTGNLQSNHDQHCQVHGNAHVASCDAIMTRCLAVHECFVKRVDWSVEYPIIGDELRVNSACRKVQHMVVKSALLADKFPVLHDIGNPKAIKCVPQAEVEWKFYDAQPCSDKAYKIEELFYSYATHHDKFTDGVCLFWNCNVDRYPANAIVCRFDTRVLSNLNLPGCDGGSLYVNKHAFHTPAFDKSAFTNLKQLPFFYYSDSPCESHGKQVVSDIDYVPLKSATCITRCNLGGAVCRHHANEYRQYLDAYNMMISAGFSLWIYKQFDTYNLWNTFTRLQSLENVAYNVVNKGHFDGHAGEAPVSIINNAVYTKVDGIDVEIFENKTTLPVNVAFELWAKRNIKPVPEIKILNNLGVDIAANTVIWDYKREAPAHVSTIGVCTMTDIAKKPTESACSSLTVLFDGRVEGQVDLFRNARNGVLITEGSVKGLTPSKGPAQASVNGVTLIGESVKTQFNYFKKVDGIIQQLPETYFTQSRDLEDFKPRSQMETDFLELAMDEFIQRYKLEGYAFEHIVYGDFSHGQLGGLHLMIGLAKRSQDSPLKLEDFIPMDSTVKNYFITDAQTGSSKCVCSVIDLLLDDFVEIIKSQDLSVISKVVKVTIDYAEISFMLWCKDGHVETFYPKLQASRAWQPGVAMPNLYKMQRMLLEKCDLQNYGENAVIPKGIMMNVAKYTQLCQYLNTLTLAVPYNMRVIHFGAGSDKGVAPGTAVLRQWLPTGTLLVDSDLNDFVSDAYSTLIGDCATVHTANKWDLIISDMYDPRTKHVTKENDSKEGFFTYLCGFIKQKLALGGSIAVKITEHSWNADLYKLMGHFSWWTAFVTNVNASSSEAFLIGANYLGKPKEQIDGYTMHANYIFWRNTNPIQLSSYSLFDMSKFPLKLRGTAVMSLKENQINDMIYSLLEKGRLIIRENNRVVVSSDILVNN

SEQ ID NO: 7243 - protein, 7076 aa, SARS coronavirus
  misc_feature 4376...4384: Xaa is any amino acid
MESLVLGVNEKTHVQLSLPVLQVRDVLVRGFGDSVEEALSEAREHLKNGTCGLVELEKGVLPQLEQPYVFIKRSDALSTNHGHKVVELVAEMDGIQYGRSGITLGVLVPHVGETPIAYRNVLLRKNGNKGAGGHSYGIDLKSYDLGDELGTDPIEDYEQNWNTKHGSGALRELTRELNGGAVTRYVDNNFCGPDGYPLDCIKDFLARAGKSMCTLSEQLDYIESKRGVYCCRDHEHEIAWFTERSDKSYEHQTPFEIKSAKKFDTFKGECPKFVFPLNSKVKVIQPRVEKKKTEGFMGRIRSVYPVASPQECNNMHLSTLMKCNHCDEVSWQTCDFLKATCEHCGTENLVIEGPTTCGYLPTNAVVKMPCPACQDPEIGPEHSVADYHNHSNIETRLRKGGRTRCFGGCVFAYVGCYNKRAYWVPRASADIGSGHTGITGDNVETLNEDLLEILSRERVNINIVGDFHLNEEVAIILASFSASTSAFIDTIKSLDYKSFKTIVESCGNYKVTKGKPVKGAWNIGQQRSVLTPLCGFPSQAAGVIRSIFARTLDAANHSIPDLQRAAVTILDGISEQSLRLVDAMVYTSDLLTNSVIIMAYVTGGLVQQTSQWLSNLLGTTVEKLRPIFEWIEAKLSAGVEFLKDAWEILKFLITGVFDIVKGQIQVASDNIKDCVKCFIDVVNKALEMCIDQVTIAGAKLRSLNLGEVFIAQSKGLYRQCIRGKEQLQLLMPLKAPKEVTFLEGDSHDTVLTSEEVVLKNGELEALETPVDSFTNGAIVGTPVCVNGLMLLEIKDKEQYCALSPGLLATNNVFRLKGGAPIKGVTFGEDTVWEVQGYKNVRITFELDERVDKVLNEKCSVYTVESGTEVTEFACVVAEAVVKTLQPVSDLLTNMGIDLDEWSVATFYLFDDAGEENFSSRMYCSFYPPDEEEEDDAECEEEEIDETCEHEYGTEDDYQGLPLEFGASAETVRVEEEEEEDWLDDTTEQSEIEPEPEPTPEEPVNQFTGYLKLTDNVAIKCVDIVKEAQSANPMVIVNAANIHLKHGGGVAGALNKATNGAMQKESDDYIKLNGPLTVGGSCLLSGHNLAKKCLHVVGPNLNAGEDIQLLKAAYENFNSQDILLAPLLSAGIFGAKPLQSLQVCVQTVRTQVYIAVNDKALYEQVVMDYLDNLKPRVEAPKQEEPPNTEDSKTEEKSVVQKPVDVKPKIKACIDEVTTTLEETKFLTNKLLLFADINGKLYHDSQNMLRGEDMSFLEKDAPYMVGDVITSGDITCVVIPSKKAGGTTEMLSRALKKVPVDEYITTYPGQGCAGYTLEEAKTALKKCKSAFYVLPSEAPNAKEEILGTVSWNLREMLAHAEETRKLMPICMDVRAIMATIQRKYKGIKIQEGIVDYGVRFFFYTSKEPVASIITKLNSLNEPLVTMPIGYVTHGFNLEEAARCMRSLKAPAVVSVSSPDAVTTYNGYLTSSSKTSEEHFVETVSLAGSYRDWSYSGQRTELGVEFLKRGDKIVYHTLESPVEFHLDGEVLSLDKLKSLLSLREVKTIKVFTTVDNTNLHTQLVDMSMTYGQQFGPTYLDGADVTKIKPHVNHEGKTFFVLPSDDTLRSEAFEYYHTLDESFLGRYMSALNHTKKWKFPQVGGLTSIKWADNNCYLSSVLLALQQLEVKFNAPALQEAYYRARAGDAANFCALILAYSNKTVGELGDVRETMTHLLQHANLESAKRVLNVVCKHCGQKTTTLTGVEAVMYMGTLSYDNLKTGVSIPCVCGRDATQYLVQQESSFVMMSAPPAEYKLQQGTFLCANEYTGNYQCGHYTHITAKETLYRIDGAHLTKMSEYKGPVTDVFYKETSYTTTIKPVSYKLDGVTYTEIEPKLDGYYKKDNAYYTEQPIDLVPTQPLPNASFDNFKLTCSNTKFADDLNQMTGFTKPASRELSVTFFPDLNGDVVAIDYRHYSASFKKGAKLLHKPIVWHINQATTKTTFKPNTWCLRCLWSTKPVDTSNSFEVLAVEDTQGMDNLACESQQPTSEEVVENPTIQKEVIECDVKTTEVVGNVILKPSDEGVKVTQELGHEDLMAAYVENTSITIKKPNELSLALGLKTIATHGIAAINSVPWSKILAYVKPFLGQAAITTSNCAKRLAQRVFNNYMPYVFTLLFQLCTFTKSTNSRIRASLPTTIAKNSVKSVAKLCLDAGINYVKSPKFSKLFTIAMWLLLLSICLGSLICVTAAFGVLLSNFGAPSYCNGVRELYLNSSNVTTMDFCEGSFPCSICLSGLDSLDSYPALETIQVTISSYKLDLTILGLAAEWVLAYMLFTKFFYLLGLSAIMQVFFGYFASHFISNSWLMWFIISIVQMAPVSAMVRMYIFFASFYYIWKSYVHIMDGCTSSTCMMCYKRNRATRVECTTIVNGMKRSFYVYANGGRGFCKTHNWNCLNCDTFCTGSTFISDEVARDLSLQFKRPINPTDQSSYIVDSVAVKNGALHLYFDKAGQKTYERHPLSHFVNLDNLRANNTKGSLPINVIVFDGKSKCDESASKSASVYYSQLMCQPILLLDQALVSDVGDSTEVSVKMFDAYVDTFSATFSVPMEKLKALVATAHSELAKGVALDGVLSTFVSAARQGVVDTDVDTKDVIECLKLSHHSDLEVTGDSCNNFMLTYNKVENMTPRDLGACIDCNARHINAQVAKSHNVSLIWNVKDYMSLSEQLRKQIRSAAKKNNIPFRLTCATTRQVVNVITTKISLKGGKIVSTCFKLMLKATLLCVLAALVCYIVMPVHTLSIHDGYTNEIIGYKAIQDGVTRDIISTDDCFANKHAGFDAWFSQRGGSYKNDKSCPVVAAIITREIGFIVPGLPGTVLRAINGDFLHFLPRVFSAVGNICYTPSKLIEYSDFATSACVLAAECTIFKDAMGKPVPYCYDTNLLEGSISYSELRPDTRYVLMDGSIIQFPNTYLEGSVRVVTTFDAEYCRHGTCERSEVGICLSTSGRWVLNNEHYRALSGVFCGVDAMNLIANIFTPLVQPVGALDVSASVVAGGIIAILVTCAAYYFMKFRRVFGEYNHVVAANALLFLMSFTILCLVPAYSFLPGVYSVFYLYLTFYFTNDVSFLAHLQWFAMFSPIVPFWITAIYVFCISLKHCHWFFNNYLRKRVMFNGVTFSTFEEAALCTFLLNKEMYLKLRSETLLPLTQYNRYLALYNKYKYFSGALDTTSYREAACCHLAKALNDFSNSGADVLYQPPQTSITSAVLQSGFRKMAFPSGKVEGCMVQVTCGTTTLNGLWLDDTVYCPRHVICTAEDMLNPNYEDLLIRKSNHSFLVQAGNVQLRVIGHSMQNCLLRLKVDTSNPKTPKYKFVRIQPGQTFSVLACYNGSPSGVYQCAMRPNHTIKGSFLNGSCGSVGFNIDYDCVSFCYMHHMELPTGVHAGTDLEGKFYGPFVDRQTAQAAGTDTTITLNVLAWLYAAVINGDRWFLNRFTTTLNDFNLVAMKYNYEPLTQDHVDILGPLSAQTGIAVLDMCAALKELLQNGMNGRTILGSTILEDEFTPFDVVRQCSGVTFQGKFKKIVKGTHHWMLLTFLTSLLILVQSTQWSLFFFVYENAFLPFTLGIMAIAACAMLLVKHKHAFLCLFLLPSLATVAYFNMVYMPASWVMRIMTWLELADTSLSGYRLKDCVMYASALVLLILMTARTVYDDAARRVWTLMNVITLVYKVYYGNALDQAISMWALVISVTSNYSGVVTTIMFLARAIVFVCVEYYPLLFITGNTLQCIMLVYCFLGYCCCCYFGLFCLLNRYFRLTLGVYDYLVSTQEFRYMNSQGLLPPKSSIDAFKLNIKLLGIGGKPCIKVATVQSKMSDVKCTSVVLLSVLQQLRVESSSKLWAQCVQLHNDILLAKDTTEAFEKMVSLLSVLLSMQGAVDINRLCEEMLDNRATLQAIASEFSSLPSYAAYATAQEAYEQAVANGDSEVVLKKLKKSLNVAKSEFDRDAAMQRKLEKMADQAMTQMYKQARSEDKRAKVTSAMQTMLFTMLRKLDNDALNNIINNARDGCVPLNIIPLTTAAKLMVVVPDYGTYKNTCDGNTFTYASALWEIQQVVDADSKIVQLSEINMDNSPNLAWPLIVTALRANSAVKLQNNELSPVALRQMSCAAGTTQTACTDDNALAYYNNSKGGRFVLALLSDHQDLKWARFPKSDGTGTIYTELEPPCRFVTDTPKGPKVKYLYFIKGLNNLNRGMVLGSLAATVRLQAGNATEVPANSTVLSFCAFAVDPAKAYKDYLASGGQPITNCVKMLCTHTGTGQAITVTPEANMDQESFGGASCCLYCRCHIDHPNPKGFCDLKGKYVQIPTTCANDPVGFTLRNTVCTVCGMWKGYGCSCDQLREPLMQSADASTXXXXXXXXXGVSAARLTPCGTGTSTDVVYRAFDIYNEKVAGFAKFLKTNCCRFQEKDEEGNLLDSYFVVKRHTMSNYQHEETIYNLVKDCPAVAVHDFFKFRVDGDMVPHISRQRLTKYTMADLVYALRHFDEGNCDTLKEILVTYNCCDDDYFNKKDWYDFVENPDILRVYANLGERVRQSLLKTVQFCDAMRDAGIVGVLTLDNQDLNGNWYDFGDFVQVAPGCGVPIVDSYYSLLMPILTLTRALAAESHMDADLAKPLIKWDLLKYDFTEERLCLFDRYFKYWDQTYHPNCINCLDDRCILHCANFNVLFSTVFPPTSFGPLVRKIFVDGVPFVVSTGYHFRELGVVHNQDVNLHSSRLSFKELLVYAADPAMHAASGNLLLDKRTTCFSVAALTNNVAFQTVKPGNFNKDFYDFAVSKGFFKEGSSVELKHFFFAQDGNAAISDYDYYRYNLPTMCDIRQLLFVVEVVDKYFDCYDGGCINANQVIVNNLDKSAGFPFNKWGKARLYYDSMSYEDQDALFAYTKRNVIPTITQMNLKYAISAKNRARTVAGVSICSTMTNRQFHQKLLKSIAATRGATVVIGTSKFYGGWHNMLKTVYSDVETPHLMGWDYPKCDRAMPNMLRIMASLVLARKHNTCCNLSHRFYRLANECAQVLSEMVMCGGSLYVKPGGTSSGDATTAYANSVFNICQAVTANVNALLSTDGNKIADKYVRNLQHRLYECLYRNRDVDHEFVDEFYAYLRKHFSMMILSDDAVVCYNSNYAAQGLVASIKNFKAVLYYQNNVFMSEAKCWTETDLTKGPHEFCSQHTMLVKQGDDYVYLPYPDPSRILGAGCFVDDIVKTDGTLMIERFVSLAIDAYPLTKHPNQEYADVFHLYLQYIRKLHDELTGHMLDMYSVMLTNDNTSRYWEPEFYEAMYTPHTVLQAVGACVLCNSQTSLRCGACIRRPFLCCKCCYDHVISTSHKLVLSVNPYVCNAPGCDVTDVTQLYLGGMSYYCKSHKPPISFPLCANGQVFGLYKNTCVGSDNVTDFNAIATCDWTNAGDYILANTCTERLKLFAAETLKATEETFKLSYGIATVREVLSDRELHLSWEVGKPRPPLNRNYVFTGYRVTKNSKVQIGEYTFEKGDYGDAVVYRGTTTYKLNVGDYFVLTSHTVMPLSAPTLVPQEHYVRITGLYPTLNISDEFSSNVANYQKVGMQKYSTLQGPPGTGKSHFAIGLALYYPSARIVYTACSHAAVDALCEKALKYLPIDKCSRIIPARARVECFDKFKVNSTLEQYVFCTVNALPETTADIVVFDEISMATNYDLSVVNARLRAKHYVYIGDPAQLPAPRTLLTKGTLEPEYFNSVCRLMKTIGPDMFLGTCRRCPAEIVDTVSALVYDNKLKAHKDKSAQCFKMFYKGVITHDVSSAINRPQIGVVREFLTRNPAWRKAVFISPYNSQNAVASKILGLPTQTVDSSQGSEYDYVIFTQTTETAHSCNVNRFNVAITRAKIGILCIMSDRDLYDKLQFTSLEIPRRNVATLQAENVTGLFKDCSKIITGLHPTQAPTHLSVDIKFKTEGLCVDIPGIPKDMTYRRLISMMGFKMNYQVNGYPNMFITREEAIRHVRAWIGFDVEGCHATRDAVGTNLPLQLGFSTGVNLVAVPTGYVDTENNTEFTRVNAKPPPGDQFKHLIPLMYKGLPWNVVRIKIVQMLSDTLKGLSDRVVFVLWAHGFELTSMKYFVKIGPERTCCLCDKRATCFSTSSDTYACWNHSVGFDYVYNPFMIDVQQWGFTGNLQSNHDQHCQVHGNAHVASCDAIMTRCLAVHECFVKRVDWSVEYPIIGDELRVNSACRKVQHMVVKSALLADKFPVLHDIGNPKAIKCVPQAEVEWKFYDAQPCSDKAYKIEELFYSYATHHDKFTDGVCLFWNCNVDRYPANAIVCRFDTRVLSNLNLPGCDGGSLYVNKHAFHTPAFDKSAFTNLKQLPFFYYSDSPCESHGKQVVSDIDYVPLKSATCITRCNLGGAVCRHHANEYRQYLDAYNMMISAGFSLWIYKQFDTYNLWNTFTRLQSLENVAYNVVNKGHFDGHAGEAPVSIINNAVYTKVDGIDVEIFENKTTLPVNVAFELWAKRNIKPVPEIKILNNLGVDIAANTVIWDYKREAPAHVSTIGVCTMTDIAKKPTESACSSLTVLFDGRVEGQVDLFRNARNGVLITEGSVKGLTPSKGPAQASVNGVTLIGESVKTQFNYFKKVDGIIQQLPETYFTQSRDLEDFKPRSQMETDFLELAMDEFIQRYKLEGYAFEHIVYGDFSHGQLGGLHLMIGLAKRSQDSPLKLEDFIPMDSTVKNYFITDAQTGSSKCVCSVIDLLLDDFVEIIKSQDLSVISKVVKVTIDYAEISFMLWCKDGHVETFYPKLQASRAWQPGVAMPNLYKMQRMLLEKCDLQNYGENAVIPKGIMMNVAKYTQLCQYLNTLTLAVPYNMRVIHFGAGSDKGVAPGTAVLRQWLPTGTLLVDSDLNDFVSDAYSTLIGDCATVHTANKWDLIISDMYDPRTKHVTKENDSKEGFFTYLCGFIKQKLALGGSIAVKITEHSWNADLYKLMGHFSWWTAFVTNVNASSSEAFLIGANYLGKPKEQIDGYTMHANYIFWRNTNPIQLSSYSLFDMSKFPLKLRGTAVMSLKENQINDMIYSLLEKGRLIIRENNRVVVSSDILVNN

SEQ ID NO: 7244 - protein, 7077 aa, SARS coronavirus
  misc_feature 4376...4385: Xaa is any amino acid
MESLVLGVNEKTHVQLSLPVLQVRDVLVRGFGDSVEEALSEAREHLKNGTCGLVELEKGVLPQLEQPYVFIKRSDALSTNHGHKVVELVAEMDGIQYGRSGITLGVLVPHVGETPIAYRNVLLRKNGNKGAGGHSYGIDLKSYDLGDELGTDPIEDYEQNWNTKHGSGALRELTRELNGGAVTRYVDNNFCGPDGYPLDCIKDFLARAGKSMCTLSEQLDYIESKRGVYCCRDHEHEIAWFTERSDKSYEHQTPFEIKSAKKFDTFKGECPKFVFPLNSKVKVIQPRVEKKKTEGFMGRIRSVYPVASPQECNNMHLSTLMKCNHCDEVSWQTCDFLKATCEHCGTENLVIEGPTTCGYLPTNAVVKMPCPACQDPEIGPEHSVADYHNHSNIETRLRKGGRTRCFGGCVFAYVGCYNKRAYWVPRASADIGSGHTGITGDNVETLNEDLLEILSRERVNINIVGDFHLNEEVAIILASFSASTSAFIDTIKSLDYKSFKTIVESCGNYKVTKGKPVKGAWNIGQQRSVLTPLCGFPSQAAGVIRSIFARTLDAANHSIPDLQRAAVTILDGISEQSLRLVDAMVYTSDLLTNSVIIMAYVTGGLVQQTSQWLSNLLGTTVEKLRPIFEWIEAKLSAGVEFLKDAWEILKFLITGVFDIVKGQIQVASDNIKDCVKCFIDVVNKALEMCIDQVTIAGAKLRSLNLGEVFIAQSKGLYRQCIRGKEQLQLLMPLKAPKEVTFLEGDSHDTVLTSEEVVLKNGELEALETPVDSFTNGAIVGTPVCVNGLMLLEIKDKEQYCALSPGLLATNNVFRLKGGAPIKGVTFGEDTVWEVQGYKNVRITFELDERVDKVLNEKCSVYTVESGTEVTEFACVVAEAVVKTLQPVSDLLTNMGIDLDEWSVATFYLFDDAGEENFSSRMYCSFYPPDEEEEDDAECEEEEIDETCEHEYGTEDDYQGLPLEFGASAETVRVEEEEEEDWLDDTTEQSEIEPEPEPTPEEPVNQFTGYLKLTDNVAIKCVDIVKEAQSANPMVIVNAANIHLKHGGGVAGALNKATNGAMQKESDDYIKLNGPLTVGGSCLLSGHNLAKKCLHVVGPNLNAGEDIQLLKAAYENFNSQDILLAPLLSAGIFGAKPLQSLQVCVQTVRTQVYIAVNDKALYEQVVMDYLDNLKPRVEAPKQEEPPNTEDSKTEEKSVVQKPVDVKPKIKACIDEVTTTLEETKFLTNKLLLFADINGKLYHDSQNMLRGEDMSFLEKDAPYMVGDVITSGDITCVVIPSKKAGGTTEMLSRALKKVPVDEYITTYPGQGCAGYTLEEAKTALKKCKSAFYVLPSEAPNAKEEILGTVSWNLREMLAHAEETRKLMPICMDVRAIMATIQRKYKGIKIQEGIVDYGVRFFFYTSKEPVASIITKLNSLNEPLVTMPIGYVTHGFNLEEAARCMRSLKAPAVVSVSSPDAVTTYNGYLTSSSKTSEEHFVETVSLAGSYRDWSYSGQRTELGVEFLKRGDKIVYHTLESPVEFHLDGEVLSLDKLKSLLSLREVKTIKVFTTVDNTNLHTQLVDMSMTYGQQFGPTYLDGADVTKIKPHVNHEGKTFFVLPSDDTLRSEAFEYYHTLDESFLGRYMSALNHTKKWKFPQVGGLTSIKWADNNCYLSSVLLALQQLEVKFNAPALQEAYYRARAGDAANFCALILAYSNKTVGELGDVRETMTHLLQHANLESAKRVLNVVCKHCGQKTTTLTGVEAVMYMGTLSYDNLKTGVSIPCVCGRDATQYLVQQESSFVMMSAPPAEYKLQQGTFLCANEYTGNYQCGHYTHITAKETLYRIDGAHLTKMSEYKGPVTDVFYKETSYTTTIKPVSYKLDGVTYTEIEPKLDGYYKKDNAYYTEQPIDLVPTQPLPNASFDNFKLTCSNTKFADDLNQMTGFTKPASRELSVTFFPDLNGDVVAIDYRHYSASFKKGAKLLHKPIVWHINQATTKTTFKPNTWCLRCLWSTKPVDTSNSFEVLAVEDTQGMDNLACESQQPTSEEVVENPTIQKEVIECDVKTTEVVGNVILKPSDEGVKVTQELGHEDLMAAYVENTSITIKKPNELSLALGLKTIATHGIAAINSVPWSKILAYVKPFLGQAAITTSNCAKRLAQRVFNNYMPYVFTLLFQLCTFTKSTNSRIRASLPTTIAKNSVKSVAKLCLDAGINYVKSPKFSKLFTIAMWLLLLSICLGSLICVTAAFGVLLSNFGAPSYCNGVRELYLNSSNVTTMDFCEGSFPCSICLSGLDSLDSYPALETIQVTISSYKLDLTILGLAAEWVLAYMLFTKFFYLLGLSAIMQVFFGYFASHFISNSWLMWFIISIVQMAPVSAMVRMYIFFASFYYIWKSYVHIMDGCTSSTCMMCYKRNRATRVECTTIVNGMKRSFYVYANGGRGFCKTHNWNCLNCDTFCTGSTFISDEVARDLSLQFKRPINPTDQSSYIVDSVAVKNGALHLYFDKAGQKTYERHPLSHFVNLDNLRANNTKGSLPINVIVFDGKSKCDESASKSASVYYSQLMCQPILLLDQALVSDVGDSTEVSVKMFDAYVDTFSATFSVPMEKLKALVATAHSELAKGVALDGVLSTFVSAARQGVVDTDVDTKDVIECLKLSHHSDLEVTGDSCNNFMLTYNKVENMTPRDLGACIDCNARHINAQVAKSHNVSLIWNVKDYMSLSEQLRKQIRSAAKKNNIPFRLTCATTRQVVNVITTKISLKGGKIVSTCFKLMLKATLLCVLAALVCYIVMPVHTLSIHDGYTNEIIGYKAIQDGVTRDIISTDDCFANKHAGFDAWFSQRGGSYKNDKSCPVVAAIITREIGFIVPGLPGTVLRAINGDFLHFLPRVFSAVGNICYTPSKLIEYSDFATSACVLAAECTIFKDAMGKPVPYCYDTNLLEGSISYSELRPDTRYVLMDGSIIQFPNTYLEGSVRVVTTFDAEYCRHGTCERSEVGICLSTSGRWVLNNEHYRALSGVFCGVDAMNLIANIFTPLVQPVGALDVSASVVAGGIIAILVTCAAYYFMKFRRVFGEYNHVVAANALLFLMSFTILCLVPAYSFLPGVYSVFYLYLTFYFTNDVSFLAHLQWFAMFSPIVPFWITAIYVFCISLKHCHWFFNNYLRKRVMFNGVTFSTFEEAALCTFLLNKEMYLKLRSETLLPLTQYNRYLALYNKYKYFSGALDTTSYREAACCHLAKALNDFSNSGADVLYQPPQTSITSAVLQSGFRKMAFPSGKVEGCMVQVTCGTTTLNGLWLDDTVYCPRHVICTAEDMLNPNYEDLLIRKSNHSFLVQAGNVQLRVIGHSMQNCLLRLKVDTSNPKTPKYKFVRIQPGQTFSVLACYNGSPSGVYQCAMRPNHTIKGSFLNGSCGSVGFNIDYDCVSFCYMHHMELPTGVHAGTDLEGKFYGPFVDRQTAQAAGTDTTITLNVLAWLYAAVINGDRWFLNRFTTTLNDFNLVAMKYNYEPLTQDHVDILGPLSAQTGIAVLDMCAALKELLQNGMNGRTILGSTILEDEFTPFDVVRQCSGVTFQGKFKKIVKGTHHWMLLTFLTSLLILVQSTQWSLFFFVYENAFLPFTLGIMAIAACAMLLVKHKHAFLCLFLLPSLATVAYFNMVYMPASWVMRIMTWLELADTSLSGYRLKDCVMYASALVLLILMTARTVYDDAARRVWTLMNVITLVYKVYYGNALDQAISMWALVISVTSNYSGVVTTIMFLARAIVFVCVEYYPLLFITGNTLQCIMLVYCFLGYCCCCYFGLFCLLNRYFRLTLGVYDYLVSTQEFRYMNSQGLLPPKSSIDAFKLNIKLLGIGGKPCIKVATVQSKMSDVKCTSVVLLSVLQQLRVESSSKLWAQCVQLHNDILLAKDTTEAFEKMVSLLSVLLSMQGAVDINRLCEEMLDNRATLQAIASEFSSLPSYAAYATAQEAYEQAVANGDSEVVLKKLKKSLNVAKSEFDRDAAMQRKLEKMADQAMTQMYKQARSEDKRAKVTSAMQTMLFTMLRKLDNDALNNIINNARDGCVPLNIIPLTTAAKLMVVVPDYGTYKNTCDGNTFTYASALWEIQQVVDADSKIVQLSEINMDNSPNLAWPLIVTALRANSAVKLQNNELSPVALRQMSCAAGTTQTACTDDNALAYYNNSKGGRFVLALLSDHQDLKWARFPKSDGTGTIYTELEPPCRFVTDTPKGPKVKYLYFIKGLNNLNRGMVLGSLAATVRLQAGNATEVPANSTVLSFCAFAVDPAKAYKDYLASGGQPITNCVKMLCTHTGTGQAITVTPEANMDQESFGGASCCLYCRCHIDHPNPKGFCDLKGKYVQIPTTCANDPVGFTLRNTVCTVCGMWKGYGCSCDQLREPLMQSADASTXXXXXXXXXXGVSAARLTPCGTGTSTDVVYRAFDIYNEKVAGFAKFLKTNCCRFQEKDEEGNLLDSYFVVKRHTMSNYQHEETIYNLVKDCPAVAVHDFFKFRVDGDMVPHISRQRLTKYTMADLVYALRHFDEGNCDTLKEILVTYNCCDDDYFNKKDWYDFVENPDILRVYANLGERVRQSLLKTVQFCDAMRDAGIVGVLTLDNQDLNGNWYDFGDFVQVAPGCGVPIVDSYYSLLMPILTLTRALAAESHMDADLAKPLIKWDLLKYDFTEERLCLFDRYFKYWDQTYHPNCINCLDDRCILHCANFNVLFSTVFPPTSFGPLVRKIFVDGVPFVVSTGYHFRELGVVHNQDVNLHSSRLSFKELLVYAADPAMHAASGNLLLDKRTTCFSVAALTNNVAFQTVKPGNFNKDFYDFAVSKGFFKEGSSVELKHFFFAQDGNAAISDYDYYRYNLPTMCDIRQLLFVVEVVDKYFDCYDGGCINANQVIVNNLDKSAGFPFNKWGKARLYYDSMSYEDQDALFAYTKRNVIPTITQMNLKYAISAKNRARTVAGVSICSTMTNRQFHQKLLKSIAATRGATVVIGTSKFYGGWHNMLKTVYSDVETPHLMGWDYPKCDRAMPNMLRIMASLVLARKHNTCCNLSHRFYRLANECAQVLSEMVMCGGSLYVKPGGTSSGDATTAYANSVFNICQAVTANVNALLSTDGNKIADKYVRNLQHRLYECLYRNRDVDHEFVDEFYAYLRKHFSMMILSDDAVVCYNSNYAAQGLVASIKNFKAVLYYQNNVFMSEAKCWTETDLTKGPHEFCSQHTMLVKQGDDYVYLPYPDPSRILGAGCFVDDIVKTDGTLMIERFVSLAIDAYPLTKHPNQEYADVFHLYLQYIRKLHDELTGHMLDMYSVMLTNDNTSRYWEPEFYEAMYTPHTVLQAVGACVLCNSQTSLRCGACIRRPFLCCKCCYDHVISTSHKLVLSVNPYVCNAPGCDVTDVTQLYLGGMSYYCKSHKPPISFPLCANGQVFGLYKNTCVGSDNVTDFNAIATCDWTNAGDYILANTCTERLKLFAAETLKATEETFKLSYGIATVREVLSDRELHLSWEVGKPRPPLNRNYVFTGYRVTKNSKVQIGEYTFEKGDYGDAVVYRGTTTYKLNVGDYFVLTSHTVMPLSAPTLVPQEHYVRITGLYPTLNISDEFSSNVANYQKVGMQKYSTLQGPPGTGKSHFAIGLALYYPSARIVYTACSHAAVDALCEKALKYLPIDKCSRIIPARARVECFDKFKVNSTLEQYVFCTVNALPETTADIVVFDEISMATNYDLSVVNARLRAKHYVYIGDPAQLPAPRTLLTKGTLEPEYFNSVCRLMKTIGPDMFLGTCRRCPAEIVDTVSALVYDNKLKAHKDKSAQCFKMFYKGVITHDVSSAINRPQIGVVREFLTRNPAWRKAVFISPYNSQNAVASKILGLPTQTVDSSQGSEYDYVIFTQTTETAHSCNVNRFNVAITRAKIGILCIMSDRDLYDKLQFTSLEIPRRNVATLQAENVTGLFKDCSKIITGLHPTQAPTHLSVDIKFKTEGLCVDIPGIPKDMTYRRLISMMGFKMNYQVNGYPNMFITREEAIRHVRAWIGFDVEGCHATRDAVGTNLPLQLGFSTGVNLVAVPTGYVDTENNTEFTRVNAKPPPGDQFKHLIPLMYKGLPWNVVRIKIVQMLSDTLKGLSDRVVFVLWAHGFELTSMKYFVKIGPERTCCLCDKRATCFSTSSDTYACWNHSVGFDYVYNPFMIDVQQWGFTGNLQSNHDQHCQVHGNAHVASCDAIMTRCLAVHECFVKRVDWSVEYPIIGDELRVNSACRKVQHMVVKSALLADKFPVLHDIGNPKAIKCVPQAEVEWKFYDAQPCSDKAYKIEELFYSYATHHDKFTDGVCLFWNCNVDRYPANAIVCRFDTRVLSNLNLPGCDGGSLYVNKHAFHTPAFDKSAFTNLKQLPFFYYSDSPCESHGKQVVSDIDYVPLKSATCITRCNLGGAVCRHHANEYRQYLDAYNMMISAGFSLWIYKQFDTYNLWNTFTRLQSLENVAYNVVNKGHFDGHAGEAPVSIINNAVYTKVDGIDVEIFENKTTLPVNVAFELWAKRNIKPVPEIKILNNLGVDIAANTVIWDYKREAPAHVSTIGVCTMTDIAKKPTESACSSLTVLFDGRVEGQVDLFRNARNGVLITEGSVKGLTPSKGPAQASVNGVTLIGESVKTQFNYFKKVDGIIQQLPETYFTQSRDLEDFKPRSQMETDFLELAMDEFIQRYKLEGYAFEHIVYGDFSHGQLGGLHLMIGLAKRSQDSPLKLEDFIPMDSTVKNYFITDAQTGSSKCVCSVIDLLLDDFVEIIKSQDLSVISKVVKVTIDYAEISFMLWCKDGHVETFYPKLQASRAWQPGVAMPNLYKMQRMLLEKCDLQNYGENAVIPKGIMMNVAKYTQLCQYLNTLTLAVPYNMRVIHFGAGSDKGVAPGTAVLRQWLPTGTLLVDSDLNDFVSDAYSTLIGDCATVHTANKWDLIISDMYDPRTKHVTKENDSKEGFFTYLCGFIKQKLALGGSIAVKITEHSWNADLYKLMGHFSWWTAFVTNVNASSSEAFLIGANYLGKPKEQIDGYTMHANYIFWRNTNPIQLSSYSLFDMSKFPLKLRGTAVMSLKENQINDMIYSLLEKGRLIIRENNRVVVSSDILVNN

SEQ ID NO: 7245 - protein, 4 aa, SARS coronavirus
FLNR

SEQ ID NO: 7246 - protein, 5 aa, SARS coronavirus
FLNRV

SEQ ID NO: 7247 - protein, 6 aa, SARS coronavirus
FLNRVC

SEQ ID NO: 7248 - protein, 7068 aa, SARS coronavirus
MESLVLGVNEKTHVQLSLPVLQVRDVLVRGFGDSVEEALSEAREHLKNGTCGLVELEKGVLPQLEQPYVFIKRSDALSTNHGHKVVELVAEMDGIQYGRSGITLGVLVPHVGETPIAYRNVLLRKNGNKGAGGHSYGIDLKSYDLGDELGTDPIEDYEQNWNTKHGSGALRELTRELNGGAVTRYVDNNFCGPDGYPLDCIKDFLARAGKSMCTLSEQLDYIESKRGVYCCRDHEHEIAWFTERSDKSYEHQTPFEIKSAKKFDTFKGECPKFVFPLNSKVKVIQPRVEKKKTEGFMGRIRSVYPVASPQECNNMHLSTLMKCNHCDEVSWQTCDFLKATCEHCGTENLVIEGPTTCGYLPTNAVVKMPCPACQDPEIGPEHSVADYHNHSNIETRLRKGGRTRCFGGCVFAYVGCYNKRAYWVPRASADIGSGHTGITGDNVETLNEDLLEILSRERVNINIVGDFHLNEEVAIILASFSASTSAFIDTIKSLDYKSFKTIVESCGNYKVTKGKPVKGAWNIGQQRSVLTPLCGFPSQAAGVIRSIFARTLDAANHSIPDLQRAAVTILDGISEQSLRLVDAMVYTSDLLTNSVIIMAYVTGGLVQQTSQWLSNLLGTTVEKLRPIFEWIEAKLSAGVEFLKDAWEILKFLITGVFDIVKGQIQVASDNIKDCVKCFIDVVNKALEMCIDQVTIAGAKLRSLNLGEVFIAQSKGLYRQCIRGKEQLQLLMPLKAPKEVTFLEGDSHDTVLTSEEVVLKNGELEALETPVDSFTNGAIVGTPVCVNGLMLLEIKDKEQYCALSPGLLATNNVFRLKGGAPIKGVTFGEDTVWEVQGYKNVRITFELDERVDKVLNEKCSVYTVESGTEVTEFACVVAEAVVKTLQPVSDLLTNMGIDLDEWSVATFYLFDDAGEENFSSRMYCSFYPPDEEEEDDAECEEEEIDETCEHEYGTEDDYQGLPLEFGASAETVRVEEEEEEDWLDDTTEQSEIEPEPEPTPEEPVNQFTGYLKLTDNVAIKCVDIVKEAQSANPMVIVNAANIHLKHGGGVAGALNKATNGAMQKESDDYIKLNGPLTVGGSCLLSGHNLAKKCLHVVGPNLNAGEDIQLLKAAYENFNSQDILLAPLLSAGIFGAKPLQSLQVCVQTVRTQVYIAVNDKALYEQVVMDYLDNLKPRVEAPKQEEPPNTEDSKTEEKSVVQKPVDVKPKIKACIDEVTTTLEETKFLTNKLLLFADINGKLYHDSQNMLRGEDMSFLEKDAPYMVGDVITSGDITCVVIPSKKAGGTTEMLSRALKKVPVDEYITTYPGQGCAGYTLEEAKTALKKCKSAFYVLPSEAPNAKEEILGTVSWNLREMLAHAEETRKLMPICMDVRAIMATIQRKYKGIKIQEGIVDYGVRFFFYTSKEPVASIITKLNSLNEPLVTMPIGYVTHGFNLEEAARCMRSLKAPAVVSVSSPDAVTTYNGYLTSSSKTSEEHFVETVSLAGSYRDWSYSGQRTELGVEFLKRGDKIVYHTLESPVEFHLDGEVLSLDKLKSLLSLREVKTIKVFTTVDNTNLHTQLVDMSMTYGQQFGPTYLDGADVTKIKPHVNHEGKTFFVLPSDDTLRSEAFEYYHTLDESFLGRYMSALNHTKKWKFPQVGGLTSIKWADNNCYLSSVLLALQQLEVKFNAPALQEAYYRARAGDAANFCALILAYSNKTVGELGDVRETMTHLLQHANLESAKRVLNVVCKHCGQKTTTLTGVEAVMYMGTLSYDNLKTGVSIPCVCGRDATQYLVQQESSFVMMSAPPAEYKLQQGTFLCANEYTGNYQCGHYTHITAKETLYRIDGAHLTKMSEYKGPVTDVFYKETSYTTTIKPVSYKLDGVTYTEIEPKLDGYYKKDNAYYTEQPIDLVPTQPLPNASFDNFKLTCSNTKFADDLNQMTGFTKPASRELSVTFFPDLNGDVVAIDYRHYSASFKKGAKLLHKPIVWHINQATTKTTFKPNTWCLRCLWSTKPVDTSNSFEVLAVEDTQGMDNLACESQQPTSEEVVENPTIQKEVIECDVKTTEVVGNVILKPSDEGVKVTQELGHEDLMAAYVENTSITIKKPNELSLALGLKTIATHGIAAINSVPWSKILAYVKPFLGQAAITTSNCAKRLAQRVFNNYMPYVFTLLFQLCTFTKSTNSRIRASLPTTIAKNSVKSVAKLCLDAGINYVKSPKFSKLFTIAMWLLLLSICLGSLICVTAAFGVLLSNFGAPSYCNGVRELYLNSSNVTTMDFCEGSFPCSICLSGLDSLDSYPALETIQVTISSYKLDLTILGLAAEWVLAYMLFTKFFYLLGLSAIMQVFFGYFASHFISNSWLMWFIISIVQMAPVSAMVRMYIFFASFYYIWKSYVHIMDGCTSSTCMMCYKRNRATRVECTTIVNGMKRSFYVYANGGRGFCKTHNWNCLNCDTFCTGSTFISDEVARDLSLQFKRPINPTDQSSYIVDSVAVKNGALHLYFDKAGQKTYERHPLSHFVNLDNLRANNTKGSLPINVIVFDGKSKCDESASKSASVYYSQLMCQPILLLDQALVSDVGDSTEVSVKMFDAYVDTFSATFSVPMEKLKALVATAHSELAKGVALDGVLSTFVSAARQGVVDTDVDTKDVIECLKLSHHSDLEVTGDSCNNFMLTYNKVENMTPRDLGACIDCNARHINAQVAKSHNVSLIWNVKDYMSLSEQLRKQIRSAAKKNNIPFRLTCATTRQVVNVITTKISLKGGKIVSTCFKLMLKATLLCVLAALVCYIVMPVHTLSIHDGYTNEIIGYKAIQDGVTRDIISTDDCFANKHAGFDAWFSQRGGSYKNDKSCPVVAAIITREIGFIVPGLPGTVLRAINGDFLHFLPRVFSAVGNICYTPSKLIEYSDFATSACVLAAECTIFKDAMGKPVPYCYDTNLLEGSISYSELRPDTRYVLMDGSIIQFPNTYLEGSVRVVTTFDAEYCRHGTCERSEVGICLSTSGRWVLNNEHYRALSGVFCGVDAMNLIANIFTPLVQPVGALDVSASVVAGGIIAILVTCAAYYFMKFRRVFGEYNHVVAANALLFLMSFTILCLVPAYSFLPGVYSVFYLYLTFYFTNDVSFLAHLQWFAMFSPIVPFWITAIYVFCISLKHCHWFFNNYLRKRVMFNGVTFSTFEEAALCTFLLNKEMYLKLRSETLLPLTQYNRYLALYNKYKYFSGALDTTSYREAACCHLAKALNDFSNSGADVLYQPPQTSITSAVLQSGFRKMAFPSGKVEGCMVQVTCGTTTLNGLWLDDTVYCPRHVICTAEDMLNPNYEDLLIRKSNHSFLVQAGNVQLRVIGHSMQNCLLRLKVDTSNPKTPKYKFVRIQPGQTFSVLACYNGSPSGVYQCAMRPNHTIKGSFLNGSCGSVGFNIDYDCVSFCYMHHMELPTGVHAGTDLEGKFYGPFVDRQTAQAAGTDTTITLNVLAWLYAAVINGDRWFLNRFTTTLNDFNLVAMKYNYEPLTQDHVDILGPLSAQTGIAVLDMCAALKELLQNGMNGRTILGSTILEDEFTPFDVVRQCSGVTFQGKFKKIVKGTHHWMLLTFLTSLLILVQSTQWSLFFFVYENAFLPFTLGIMAIAACAMLLVKHKHAFLCLFLLPSLATVAYFNMVYMPASWVMRIMTWLELADTSLSGYRLKDCVMYASALVLLILMTARTVYDDAARRVWTLMNVITLVYKVYYGNALDQAISMWALVISVTSNYSGVVTTIMFLARAIVFVCVEYYPLLFITGNTLQCIMLVYCFLGYCCCCYFGLFCLLNRYFRLTLGVYDYLVSTQEFRYMNSQGLLPPKSSIDAFKLNIKLLGIGGKPCIKVATVQSKMSDVKCTSVVLLSVLQQLRVESSSKLWAQCVQLHNDILLAKDTTEAFEKMVSLLSVLLSMQGAVDINRLCEEMLDNRATLQAIASEFSSLPSYAAYATAQEAYEQAVANGDSEVVLKKLKKSLNVAKSEFDRDAAMQRKLEKMADQAMTQMYKQARSEDKRAKVTSAMQTMLFTMLRKLDNDALNNIINNARDGCVPLNIIPLTTAAKLMVVVPDYGTYKNTCDGNTFTYASALWEIQQVVDADSKIVQLSEINMDNSPNLAWPLIVTALRANSAVKLQNNELSPVALRQMSCAAGTTQTACTDDNALAYYNNSKGGRFVLALLSDHQDLKWARFPKSDGTGTIYTELEPPCRFVTDTPKGPKVKYLYFIKGLNNLNRGMVLGSLAATVRLQAGNATEVPANSTVLSFCAFAVDPAKAYKDYLASGGQPITNCVKMLCTHTGTGQAITVTPEANMDQESFGGASCCLYCRCHIDHPNPKGFCDLKGKYVQIPTTCANDPVGFTLRNTVCTVCGMWKGYGCSCDQLREPLMQSADASTFGVSAARLTPCGTGTSTDVVYRAFDIYNEKVAGFAKFLKTNCCRFQEKDEEGNLLDSYFVVKRHTMSNYQHEETIYNLVKDCPAVAVHDFFKFRVDGDMVPHISRQRLTKYTMADLVYALRHFDEGNCDTLKEILVTYNCCDDDYFNKKDWYDFVENPDILRVYANLGERVRQSLLKTVQFCDAMRDAGIVGVLTLDNQDLNGNWYDFGDFVQVAPGCGVPIVDSYYSLLMPILTLTRALAAESHMDADLAKPLIKWDLLKYDFTEERLCLFDRYFKYWDQTYHPNCINCLDDRCILHCANFNVLFSTVFPPTSFGPLVRKIFVDGVPFVVSTGYHFRELGVVHNQDVNLHSSRLSFKELLVYAADPAMHAASGNLLLDKRTTCFSVAALTNNVAFQTVKPGNFNKDFYDFAVSKGFFKEGSSVELKHFFFAQDGNAAISDYDYYRYNLPTMCDIRQLLFVVEVVDKYFDCYDGGCINANQVIVNNLDKSAGFPFNKWGKARLYYDSMSYEDQDALFAYTKRNVIPTITQMNLKYAISAKNRARTVAGVSICSTMTNRQFHQKLLKSIAATRGATVVIGTSKFYGGWHNMLKTVYSDVETPHLMGWDYPKCDRAMPNMLRIMASLVLARKHNTCCNLSHRFYRLANECAQVLSEMVMCGGSLYVKPGGTSSGDATTAYANSVFNICQAVTANVNALLSTDGNKIADKYVRNLQHRLYECLYRNRDVDHEFVDEFYAYLRKHFSMMILSDDAVVCYNSNYAAQGLVASIKNFKAVLYYQNNVFMSEAKCWTETDLTKGPHEFCSQHTMLVKQGDDYVYLPYPDPSRILGAGCFVDDIVKTDGTLMIERFVSLAIDAYPLTKHPNQEYADVFHLYLQYIRKLHDELTGHMLDMYSVMLTNDNTSRYWEPEFYEAMYTPHTVLQAVGACVLCNSQTSLRCGACIRRPFLCCKCCYDHVISTSHKLVLSVNPYVCNAPGCDVTDVTQLYLGGMSYYCKSHKPPISFPLCANGQVFGLYKNTCVGSDNVTDFNAIATCDWTNAGDYILANTCTERLKLFAAETLKATEETFKLSYGIATVREVLSDRELHLSWEVGKPRPPLNRNYVFTGYRVTKNSKVQIGEYTFEKGDYGDAVVYRGTTTYKLNVGDYFVLTSHTVMPLSAPTLVPQEHYVRITGLYPTLNISDEFSSNVANYQKVGMQKYSTLQGPPGTGKSHFAIGLALYYPSARIVYTACSHAAVDALCEKALKYLPIDKCSRIIPARARVECFDKFKVNSTLEQYVFCTVNALPETTADIVVFDEISMATNYDLSVVNARLRAKHYVYIGDPAQLPAPRTLLTKGTLEPEYFNSVCRLMKTIGPDMFLGTCRRCPAEIVDTVSALVYDNKLKAHKDKSAQCFKMFYKGVITHDVSSAINRPQIGVVREFLTRNPAWRKAVFISPYNSQNAVASKILGLPTQTVDSSQGSEYDYVIFTQTTETAHSCNVNRFNVAITRAKIGILCIMSDRDLYDKLQFTSLEIPRRNVATLQAENVTGLFKDCSKIITGLHPTQAPTHLSVDIKFKTEGLCVDIPGIPKDMTYRRLISMMGFKMNYQVNGYPNMFITREEAIRHVRAWIGFDVEGCHATRDAVGTNLPLQLGFSTGVNLVAVPTGYVDTENNTEFTRVNAKPPPGDQFKHLIPLMYKGLPWNVVRIKIVQMLSDTLKGLSDRVVFVLWAHGFELTSMKYFVKIGPERTCCLCDKRATCFSTSSDTYACWNHSVGFDYVYNPFMIDVQQWGFTGNLQSNHDQHCQVHGNAHVASCDAIMTRCLAVHECFVKRVDWSVEYPIIGDELRVNSACRKVQHMVVKSALLADKFPVLHDIGNPKAIKCVPQAEVEWKFYDAQPCSDKAYKIEELFYSYATHHDKFTDGVCLFWNCNVDRYPANAIVCRFDTRVLSNLNLPGCDGGSLYVNKHAFHTPAFDKSAFTNLKQLPFFYYSDSPCESHGKQVVSDIDYVPLKSATCITRCNLGGAVCRHHANEYRQYLDAYNMMISAGFSLWIYKQFDTYNLWNTFTRLQSLENVAYNVVNKGHFDGHAGEAPVSIINNAVYTKVDGIDVEIFENKTTLPVNVAFELWAKRNIKPVPEIKILNNLGVDIAANTVIWDYKREAPAHVSTIGVCTMTDIAKKPTESACSSLTVLFDGRVEGQVDLFRNARNGVLITEGSVKGLTPSKGPAQASVNGVTLIGESVKTQFNYFKKVDGIIQQLPETYFTQSRDLEDFKPRSQMETDFLELAMDEFIQRYKLEGYAFEHIVYGDFSHGQLGGLHLMIGLAKRSQDSPLKLEDFIPMDSTVKNYFITDAQTGSSKCVCSVIDLLLDDFVEIIKSQDLSVISKVVKVTIDYAEISFMLWCKDGHVETFYPKLQASRAWQPGVAMPNLYKMQRMLLEKCDLQNYGENAVIPKGIMMNVAKYTQLCQYLNTLTLAVPYNMRVIHFGAGSDKGVAPGTAVLRQWLPTGTLLVDSDLNDFVSDAYSTLIGDCATVHTANKWDLIISDMYDPRTKHVTKENDSKEGFFTYLCGFIKQKLALGGSIAVKITEHSWNADLYKLMGHFSWWTAFVTNVNASSSEAFLIGANYLGKPKEQIDGYTMHANYIFWRNTNPIQLSSYSLFDMSKFPLKLRGTAVMSLKENQINDMIYSLLEKGRLIIRENNRVVVSSDILVNN

SEQ ID NO: 7249 - protein, 7069 aa, SARS coronavirus
MESLVLGVNEKTHVQLSLPVLQVRDVLVRGFGDSVEEALSEAREHLKNGTCGLVELEKGVLPQLEQPYVFIKRSDALSTNHGHKVVELVAEMDGIQYGRSGITLGVLVPHVGETPIAYRNVLLRKNGNKGAGGHSYGIDLKSYDLGDELGTDPIEDYEQNWNTKHGSGALRELTRELNGGAVTRYVDNNFCGPDGYPLDCIKDFLARAGKSMCTLSEQLDYIESKRGVYCCRDHEHEIAWFTERSDKSYEHQTPFEIKSAKKFDTFKGECPKFVFPLNSKVKVIQPRVEKKKTEGFMGRIRSVYPVASPQECNNMHLSTLMKCNHCDEVSWQTCDFLKATCEHCGTENLVIEGPTTCGYLPTNAVVKMPCPACQDPEIGPEHSVADYHNHSNIETRLRKGGRTRCFGGCVFAYVGCYNKRAYWVPRASADIGSGHTGITGDNVETLNEDLLEILSRERVNINIVGDFHLNEEVAIILASFSASTSAFIDTIKSLDYKSFKTIVESCGNYKVTKGKPVKGAWNIGQQRSVLTPLCGFPSQAAGVIRSIFARTLDAANHSIPDLQRAAVTILDGISEQSLRLVDAMVYTSDLLTNSVIIMAYVTGGLVQQTSQWLSNLLGTTVEKLRPIFEWIEAKLSAGVEFLKDAWEILKFLITGVFDIVKGQIQVASDNIKDCVKCFIDVVNKALEMCIDQVTIAGAKLRSLNLGEVFIAQSKGLYRQCIRGKEQLQLLMPLKAPKEVTFLEGDSHDTVLTSEEVVLKNGELEALETPVDSFTNGAIVGTPVCVNGLMLLEIKDKEQYCALSPGLLATNNVFRLKGGAPIKGVTFGEDTVWEVQGYKNVRITFELDERVDKVLNEKCSVYTVESGTEVTEFACVVAEAVVKTLQPVSDLLTNMGIDLDEWSVATFYLFDDAGEENFSSRMYCSFYPPDEEEEDDAECEEEEIDETCEHEYGTEDDYQGLPLEFGASAETVRVEEEEEEDWLDDTTEQSEIEPEPEPTPEEPVNQFTGYLKLTDNVAIKCVDIVKEAQSANPMVIVNAANIHLKHGGGVAGALNKATNGAMQKESDDYIKLNGPLTVGGSCLLSGHNLAKKCLHVVGPNLNAGEDIQLLKAAYENFNSQDILLAPLLSAGIFGAKPLQSLQVCVQTVRTQVYIAVNDKALYEQVVMDYLDNLKPRVEAPKQEEPPNTEDSKTEEKSVVQKPVDVKPKIKACIDEVTTTLEETKFLTNKLLLFADINGKLYHDSQNMLRGEDMSFLEKDAPYMVGDVITSGDITCVVIPSKKAGGTTEMLSRALKKVPVDEYITTYPGQGCAGYTLEEAKTALKKCKSAFYVLPSEAPNAKEEILGTVSWNLREMLAHAEETRKLMPICMDVRAIMATIQRKYKGIKIQEGIVDYGVRFFFYTSKEPVASIITKLNSLNEPLVTMPIGYVTHGFNLEEAARCMRSLKAPAVVSVSSPDAVTTYNGYLTSSSKTSEEHFVETVSLAGSYRDWSYSGQRTELGVEFLKRGDKIVYHTLESPVEFHLDGEVLSLDKLKSLLSLREVKTIKVFTTVDNTNLHTQLVDMSMTYGQQFGPTYLDGADVTKIKPHVNHEGKTFFVLPSDDTLRSEAFEYYHTLDESFLGRYMSALNHTKKWKFPQVGGLTSIKWADNNCYLSSVLLALQQLEVKFNAPALQEAYYRARAGDAANFCALILAYSNKTVGELGDVRETMTHLLQHANLESAKRVLNVVCKHCGQKTTTLTGVEAVMYMGTLSYDNLKTGVSIPCVCGRDATQYLVQQESSFVMMSAPPAEYKLQQGTFLCANEYTGNYQCGHYTHITAKETLYRIDGAHLTKMSEYKGPVTDVFYKETSYTTTIKPVSYKLDGVTYTEIEPKLDGYYKKDNAYYTEQPIDLVPTQPLPNASFDNFKLTCSNTKFADDLNQMTGFTKPASRELSVTFFPDLNGDVVAIDYRHYSASFKKGAKLLHKPIVWHINQATTKTTFKPNTWCLRCLWSTKPVDTSNSFEVLAVEDTQGMDNLACESQQPTSEEVVENPTIQKEVIECDVKTTEVVGNVILKPSDEGVKVTQELGHEDLMAAYVENTSITIKKPNELSLALGLKTIATHGIAAINSVPWSKILAYVKPFLGQAAITTSNCAKRLAQRVFNNYMPYVFTLLFQLCTFTKSTNSRIRASLPTTIAKNSVKSVAKLCLDAGINYVKSPKFSKLFTIAMWLLLLSICLGSLICVTAAFGVLLSNFGAPSYCNGVRELYLNSSNVTTMDFCEGSFPCSICLSGLDSLDSYPALETIQVTISSYKLDLTILGLAAEWVLAYMLFTKFFYLLGLSAIMQVFFGYFASHFISNSWLMWFIISIVQMAPVSAMVRMYIFFASFYYIWKSYVHIMDGCTSSTCMMCYKRNRATRVECTTIVNGMKRSFYVYANGGRGFCKTHNWNCLNCDTFCTGSTFISDEVARDLSLQFKRPINPTDQSSYIVDSVAVKNGALHLYFDKAGQKTYERHPLSHFVNLDNLRANNTKGSLPINVIVFDGKSKCDESASKSASVYYSQLMCQPILLLDQALVSDVGDSTEVSVKMFDAYVDTFSATFSVPMEKLKALVATAHSELAKGVALDGVLSTFVSAARQGVVDTDVDTKDVIECLKLSHHSDLEVTGDSCNNFMLTYNKVENMTPRDLGACIDCNARHINAQVAKSHNVSLIWNVKDYMSLSEQLRKQIRSAAKKNNIPFRLTCATTRQVVNVITTKISLKGGKIVSTCFKLMLKATLLCVLAALVCYIVMPVHTLSIHDGYTNEIIGYKAIQDGVTRDIISTDDCFANKHAGFDAWFSQRGGSYKNDKSCPVVAAIITREIGFIVPGLPGTVLRAINGDFLHFLPRVFSAVGNICYTPSKLIEYSDFATSACVLAAECTIFKDAMGKPVPYCYDTNLLEGSISYSELRPDTRYVLMDGSIIQFPNTYLEGSVRVVTTFDAEYCRHGTCERSEVGICLSTSGRWVLNNEHYRALSGVFCGVDAMNLIANIFTPLVQPVGALDVSASVVAGGIIAILVTCAAYYFMKFRRVFGEYNHVVAANALLFLMSFTILCLVPAYSFLPGVYSVFYLYLTFYFTNDVSFLAHLQWFAMFSPIVPFWITAIYVFCISLKHCHWFFNNYLRKRVMFNGVTFSTFEEAALCTFLLNKEMYLKLRSETLLPLTQYNRYLALYNKYKYFSGALDTTSYREAACCHLAKALNDFSNSGADVLYQPPQTSITSAVLQSGFRKMAFPSGKVEGCMVQVTCGTTTLNGLWLDDTVYCPRHVICTAEDMLNPNYEDLLIRKSNHSFLVQAGNVQLRVIGHSMQNCLLRLKVDTSNPKTPKYKFVRIQPGQTFSVLACYNGSPSGVYQCAMRPNHTIKGSFLNGSCGSVGFNIDYDCVSFCYMHHMELPTGVHAGTDLEGKFYGPFVDRQTAQAAGTDTTITLNVLAWLYAAVINGDRWFLNRFTTTLNDFNLVAMKYNYEPLTQDHVDILGPLSAQTGIAVLDMCAALKELLQNGMNGRTILGSTILEDEFTPFDVVRQCSGVTFQGKFKKIVKGTHHWMLLTFLTSLLILVQSTQWSLFFFVYENAFLPFTLGIMAIAACAMLLVKHKHAFLCLFLLPSLATVAYFNMVYMPASWVMRIMTWLELADTSLSGYRLKDCVMYASALVLLILMTARTVYDDAARRVWTLMNVITLVYKVYYGNALDQAISMWALVISVTSNYSGVVTTIMFLARAIVFVCVEYYPLLFITGNTLQCIMLVYCFLGYCCCCYFGLFCLLNRYFRLTLGVYDYLVSTQEFRYMNSQGLLPPKSSIDAFKLNIKLLGIGGKPCIKVATVQSKMSDVKCTSVVLLSVLQQLRVESSSKLWAQCVQLHNDILLAKDTTEAFEKMVSLLSVLLSMQGAVDINRLCEEMLDNRATLQAIASEFSSLPSYAAYATAQEAYEQAVANGDSEVVLKKLKKSLNVAKSEFDRDAAMQRKLEKMADQAMTQMYKQARSEDKRAKVTSAMQTMLFTMLRKLDNDALNNIINNARDGCVPLNIIPLTTAAKLMVVVPDYGTYKNTCDGNTFTYASALWEIQQVVDADSKIVQLSEINMDNSPNLAWPLIVTALRANSAVKLQNNELSPVALRQMSCAAGTTQTACTDDNALAYYNNSKGGRFVLALLSDHQDLKWARFPKSDGTGTIYTELEPPCRFVTDTPKGPKVKYLYFIKGLNNLNRGMVLGSLAATVRLQAGNATEVPANSTVLSFCAFAVDPAKAYKDYLASGGQPITNCVKMLCTHTGTGQAITVTPEANMDQESFGGASCCLYCRCHIDHPNPKGFCDLKGKYVQIPTTCANDPVGFTLRNTVCTVCGMWKGYGCSCDQLREPLMQSADASTFLGVSAARLTPCGTGTSTDVVYRAFDIYNEKVAGFAKFLKTNCCRFQEKDEEGNLLDSYFVVKRHTMSNYQHEETIYNLVKDCPAVAVHDFFKFRVDGDMVPHISRQRLTKYTMADLVYALRHFDEGNCDTLKEILVTYNCCDDDYFNKKDWYDFVENPDILRVYANLGERVRQSLLKTVQFCDAMRDAGIVGVLTLDNQDLNGNWYDFGDFVQVAPGCGVPIVDSYYSLLMPILTLTRALAAESHMDADLAKPLIKWDLLKYDFTEERLCLFDRYFKYWDQTYHPNCINCLDDRCILHCANFNVLFSTVFPPTSFGPLVRKIFVDGVPFVVSTGYHFRELGVVHNQDVNLHSSRLSFKELLVYAADPAMHAASGNLLLDKRTTCFSVAALTNNVAFQTVKPGNFNKDFYDFAVSKGFFKEGSSVELKHFFFAQDGNAAISDYDYYRYNLPTMCDIRQLLFVVEVVDKYFDCYDGGCINANQVIVNNLDKSAGFPFNKWGKARLYYDSMSYEDQDALFAYTKRNVIPTITQMNLKYAISAKNRARTVAGVSICSTMTNRQFHQKLLKSIAATRGATVVIGTSKFYGGWHNMLKTVYSDVETPHLMGWDYPKCDRAMPNMLRIMASLVLARKHNTCCNLSHRFYRLANECAQVLSEMVMCGGSLYVKPGGTSSGDATTAYANSVFNICQAVTANVNALLSTDGNKIADKYVRNLQHRLYECLYRNRDVDHEFVDEFYAYLRKHFSMMILSDDAVVCYNSNYAAQGLVASIKNFKAVLYYQNNVFMSEAKCWTETDLTKGPHEFCSQHTMLVKQGDDYVYLPYPDPSRILGAGCFVDDIVKTDGTLMIERFVSLAIDAYPLTKHPNQEYADVFHLYLQYIRKLHDELTGHMLDMYSVMLTNDNTSRYWEPEFYEAMYTPHTVLQAVGACVLCNSQTSLRCGACIRRPFLCCKCCYDHVISTSHKLVLSVNPYVCNAPGCDVTDVTQLYLGGMSYYCKSHKPPISFPLCANGQVFGLYKNTCVGSDNVTDFNAIATCDWTNAGDYILANTCTERLKLFAAETLKATEETFKLSYGIATVREVLSDRELHLSWEVGKPRPPLNRNYVFTGYRVTKNSKVQIGEYTFEKGDYGDAVVYRGTTTYKLNVGDYFVLTSHTVMPLSAPTLVPQEHYVRITGLYPTLNISDEFSSNVANYQKVGMQKYSTLQGPPGTGKSHFAIGLALYYPSARIVYTACSHAAVDALCEKALKYLPIDKCSRIIPARARVECFDKFKVNSTLEQYVFCTVNALPETTADIVVFDEISMATNYDLSVVNARLRAKHYVYIGDPAQLPAPRTLLTKGTLEPEYFNSVCRLMKTIGPDMFLGTCRRCPAEIVDTVSALVYDNKLKAHKDKSAQCFKMFYKGVITHDVSSAINRPQIGVVREFLTRNPAWRKAVFISPYNSQNAVASKILGLPTQTVDSSQGSEYDYVIFTQTTETAHSCNVNRFNVAITRAKIGILCIMSDRDLYDKLQFTSLEIPRRNVATLQAENVTGLFKDCSKIITGLHPTQAPTHLSVDIKFKTEGLCVDIPGIPKDMTYRRLISMMGFKMNYQVNGYPNMFITREEAIRHVRAWIGFDVEGCHATRDAVGTNLPLQLGFSTGVNLVAVPTGYVDTENNTEFTRVNAKPPPGDQFKHLIPLMYKGLPWNVVRIKIVQMLSDTLKGLSDRVVFVLWAHGFELTSMKYFVKIGPERTCCLCDKRATCFSTSSDTYACWNHSVGFDYVYNPFMIDVQQWGFTGNLQSNHDQHCQVHGNAHVASCDAIMTRCLAVHECFVKRVDWSVEYPIIGDELRVNSACRKVQHMVVKSALLADKFPVLHDIGNPKAIKCVPQAEVEWKFYDAQPCSDKAYKIEELFYSYATHHDKFTDGVCLFWNCNVDRYPANAIVCRFDTRVLSNLNLPGCDGGSLYVNKHAFHTPAFDKSAFTNLKQLPFFYYSDSPCESHGKQVVSDIDYVPLKSATCITRCNLGGAVCRHHANEYRQYLDAYNMMISAGFSLWIYKQFDTYNLWNTFTRLQSLENVAYNVVNKGHFDGHAGEAPVSIINNAVYTKVDGIDVEIFENKTTLPVNVAFELWAKRNIKPVPEIKILNNLGVDIAANTVIWDYKREAPAHVSTIGVCTMTDIAKKPTESACSSLTVLFDGRVEGQVDLFRNARNGVLITEGSVKGLTPSKGPAQASVNGVTLIGESVKTQFNYFKKVDGIIQQLPETYFTQSRDLEDFKPRSQMETDFLELAMDEFIQRYKLEGYAFEHIVYGDFSHGQLGGLHLMIGLAKRSQDSPLKLEDFIPMDSTVKNYFITDAQTGSSKCVCSVIDLLLDDFVEIIKSQDLSVISKVVKVTIDYAEISFMLWCKDGHVETFYPKLQASRAWQPGVAMPNLYKMQRMLLEKCDLQNYGENAVIPKGIMMNVAKYTQLCQYLNTLTLAVPYNMRVIHFGAGSDKGVAPGTAVLRQWLPTGTLLVDSDLNDFVSDAYSTLIGDCATVHTANKWDLIISDMYDPRTKHVTKENDSKEGFFTYLCGFIKQKLALGGSIAVKITEHSWNADLYKLMGHFSWWTAFVTNVNASSSEAFLIGANYLGKPKEQIDGYTMHANYIFWRNTNPIQLSSYSLFDMSKFPLKLRGTAVMSLKENQINDMIYSLLEKGRLIIRENNRVVVSSDILVNN

SEQ ID NO: 7250 - protein, 7070 aa, SARS coronavirus
MESLVLGVNEKTHVQLSLPVLQVRDVLVRGFGDSVEEALSEAREHLKNGTCGLVELEKGVLPQLEQPYVFIKRSDALSTNHGHKVVELVAEMDGIQYGRSGITLGVLVPHVGETPIAYRNVLLRKNGNKGAGGHSYGIDLKSYDLGDELGTDPIEDYEQNWNTKHGSGALRELTRELNGGAVTRYVDNNFCGPDGYPLDCIKDFLARAGKSMCTLSEQLDYIESKRGVYCCRDHEHEIAWFTERSDKSYEHQTPFEIKSAKKFDTFKGECPKFVFPLNSKVKVIQPRVEKKKTEGFMGRIRSVYPVASPQECNNMHLSTLMKCNHCDEVSWQTCDFLKATCEHCGTENLVIEGPTTCGYLPTNAVVKMPCPACQDPEIGPEHSVADYHNHSNIETRLRKGGRTRCFGGCVFAYVGCYNKRAYWVPRASADIGSGHTGITGDNVETLNEDLLEILSRERVNINIVGDFHLNEEVAIILASFSASTSAFIDTIKSLDYKSFKTIVESCGNYKVTKGKPVKGAWNIGQQRSVLTPLCGFPSQAAGVIRSIFARTLDAANHSIPDLQRAAVTILDGISEQSLRLVDAMVYTSDLLTNSVIIMAYVTGGLVQQTSQWLSNLLGTTVEKLRPIFEWIEAKLSAGVEFLKDAWEILKFLITGVFDIVKGQIQVASDNIKDCVKCFIDVVNKALEMCIDQVTIAGAKLRSLNLGEVFIAQSKGLYRQCIRGKEQLQLLMPLKAPKEVTFLEGDSHDTVLTSEEVVLKNGELEALETPVDSFTNGAIVGTPVCVNGLMLLEIKDKEQYCALSPGLLATNNVFRLKGGAPIKGVTFGEDTVWEVQGYKNVRITFELDERVDKVLNEKCSVYTVESGTEVTEFACVVAEAVVKTLQPVSDLLTNMGIDLDEWSVATFYLFDDAGEENFSSRMYCSFYPPDEEEEDDAECEEEEIDETCEHEYGTEDDYQGLPLEFGASAETVRVEEEEEEDWLDDTTEQSEIEPEPEPTPEEPVNQFTGYLKLTDNVAIKCVDIVKEAQSANPMVIVNAANIHLKHGGGVAGALNKATNGAMQKESDDYIKLNGPLTVGGSCLLSGHNLAKKCLHVVGPNLNAGEDIQLLKAAYENFNSQDILLAPLLSAGIFGAKPLQSLQVCVQTVRTQVYIAVNDKALYEQVVMDYLDNLKPRVEAPKQEEPPNTEDSKTEEKSVVQKPVDVKPKIKACIDEVTTTLEETKFLTNKLLLFADINGKLYHDSQNMLRGEDMSFLEKDAPYMVGDVITSGDITCVVIPSKKAGGTTEMLSRALKKVPVDEYITTYPGQGCAGYTLEEAKTALKKCKSAFYVLPSEAPNAKEEILGTVSWNLREMLAHAEETRKLMPICMDVRAIMATIQRKYKGIKIQEGIVDYGVRFFFYTSKEPVASIITKLNSLNEPLVTMPIGYVTHGFNLEEAARCMRSLKAPAVVSVSSPDAVTTYNGYLTSSSKTSEEHFVETVSLAGSYRDWSYSGQRTELGVEFLKRGDKIVYHTLESPVEFHLDGEVLSLDKLKSLLSLREVKTIKVFTTVDNTNLHTQLVDMSMTYGQQFGPTYLDGADVTKIKPHVNHEGKTFFVLPSDDTLRSEAFEYYHTLDESFLGRYMSALNHTKKWKFPQVGGLTSIKWADNNCYLSSVLLALQQLEVKFNAPALQEAYYRARAGDAANFCALILAYSNKTVGELGDVRETMTHLLQHANLESAKRVLNVVCKHCGQKTTTLTGVEAVMYMGTLSYDNLKTGVSIPCVCGRDATQYLVQQESSFVMMSAPPAEYKLQQGTFLCANEYTGNYQCGHYTHITAKETLYRIDGAHLTKMSEYKGPVTDVFYKETSYTTTIKPVSYKLDGVTYTEIEPKLDGYYKKDNAYYTEQPIDLVPTQPLPNASFDNFKLTCSNTKFADDLNQMTGFTKPASRELSVTFFPDLNGDVVAIDYRHYSASFKKGAKLLHKPIVWHINQATTKTTFKPNTWCLRCLWSTKPVDTSNSFEVLAVEDTQGMDNLACESQQPTSEEVVENPTIQKEVIECDVKTTEVVGNVILKPSDEGVKVTQELGHEDLMAAYVENTSITIKKPNELSLALGLKTIATHGIAAINSVPWSKILAYVKPFLGQAAITTSNCAKRLAQRVFNNYMPYVFTLLFQLCTFTKSTNSRIRASLPTTIAKNSVKSVAKLCLDAGINYVKSPKFSKLFTIAMWLLLLSICLGSLICVTAAFGVLLSNFGAPSYCNGVRELYLNSSNVTTMDFCEGSFPCSICLSGLDSLDSYPALETIQVTISSYKLDLTILGLAAEWVLAYMLFTKFFYLLGLSAIMQVFFGYFASHFISNSWLMWFIISIVQMAPVSAMVRMYIFFASFYYIWKSYVHIMDGCTSSTCMMCYKRNRATRVECTTIVNGMKRSFYVYANGGRGFCKTHNWNCLNCDTFCTGSTFISDEVARDLSLQFKRPINPTDQSSYIVDSVAVKNGALHLYFDKAGQKTYERHPLSHFVNLDNLRANNTKGSLPINVIVFDGKSKCDESASKSASVYYSQLMCQPILLLDQALVSDVGDSTEVSVKMFDAYVDTFSATFSVPMEKLKALVATAHSELAKGVALDGVLSTFVSAARQGVVDTDVDTKDVIECLKLSHHSDLEVTGDSCNNFMLTYNKVENMTPRDLGACIDCNARHINAQVAKSHNVSLIWNVKDYMSLSEQLRKQIRSAAKKNNIPFRLTCATTRQVVNVITTKISLKGGKIVSTCFKLMLKATLLCVLAALVCYIVMPVHTLSIHDGYTNEIIGYKAIQDGVTRDIISTDDCFANKHAGFDAWFSQRGGSYKNDKSCPVVAAIITREIGFIVPGLPGTVLRAINGDFLHFLPRVFSAVGNICYTPSKLIEYSDFATSACVLAAECTIFKDAMGKPVPYCYDTNLLEGSISYSELRPDTRYVLMDGSIIQFPNTYLEGSVRVVTTFDAEYCRHGTCERSEVGICLSTSGRWVLNNEHYRALSGVFCGVDAMNLIANIFTPLVQPVGALDVSASVVAGGIIAILVTCAAYYFMKFRRVFGEYNHVVAANALLFLMSFTILCLVPAYSFLPGVYSVFYLYLTFYFTNDVSFLAHLQWFAMFSPIVPFWITAIYVFCISLKHCHWFFNNYLRKRVMFNGVTFSTFEEAALCTFLLNKEMYLKLRSETLLPLTQYNRYLALYNKYKYFSGALDTTSYREAACCHLAKALNDFSNSGADVLYQPPQTSITSAVLQSGFRKMAFPSGKVEGCMVQVTCGTTTLNGLWLDDTVYCPRHVICTAEDMLNPNYEDLLIRKSNHSFLVQAGNVQLRVIGHSMQNCLLRLKVDTSNPKTPKYKFVRIQPGQTFSVLACYNGSPSGVYQCAMRPNHTIKGSFLNGSCGSVGFNIDYDCVSFCYMHHMELPTGVHAGTDLEGKFYGPFVDRQTAQAAGTDTTITLNVLAWLYAAVINGDRWFLNRFTTTLNDFNLVAMKYNYEPLTQDHVDILGPLSAQTGIAVLDMCAALKELLQNGMNGRTILGSTILEDEFTPFDVVRQCSGVTFQGKFKKIVKGTHHWMLLTFLTSLLILVQSTQWSLFFFVYENAFLPFTLGIMAIAACAMLLVKHKHAFLCLFLLPSLATVAYFNMVYMPASWVMRIMTWLELADTSLSGYRLKDCVMYASALVLLILMTARTVYDDAARRVWTLMNVITLVYKVYYGNALDQAISMWALVISVTSNYSGVVTTIMFLARAIVFVCVEYYPLLFITGNTLQCIMLVYCFLGYCCCCYFGLFCLLNRYFRLTLGVYDYLVSTQEFRYMNSQGLLPPKSSIDAFKLNIKLLGIGGKPCIKVATVQSKMSDVKCTSVVLLSVLQQLRVESSSKLWAQCVQLHNDILLAKDTTEAFEKMVSLLSVLLSMQGAVDINRLCEEMLDNRATLQAIASEFSSLPSYAAYATAQEAYEQAVANGDSEVVLKKLKKSLNVAKSEFDRDAAMQRKLEKMADQAMTQMYKQARSEDKRAKVTSAMQTMLFTMLRKLDNDALNNIINNARDGCVPLNIIPLTTAAKLMVVVPDYGTYKNTCDGNTFTYASALWEIQQVVDADSKIVQLSEINMDNSPNLAWPLIVTALRANSAVKLQNNELSPVALRQMSCAAGTTQTACTDDNALAYYNNSKGGRFVLALLSDHQDLKWARFPKSDGTGTIYTELEPPCRFVTDTPKGPKVKYLYFIKGLNNLNRGMVLGSLAATVRLQAGNATEVPANSTVLSFCAFAVDPAKAYKDYLASGGQPITNCVKMLCTHTGTGQAITVTPEANMDQESFGGASCCLYCRCHIDHPNPKGFCDLKGKYVQIPTTCANDPVGFTLRNTVCTVCGMWKGYGCSCDQLREPLMQSADASTFLNGVSAARLTPCGTGTSTDVVYRAFDIYNEKVAGFAKFLKTNCCRFQEKDEEGNLLDSYFVVKRHTMSNYQHEETIYNLVKDCPAVAVHDFFKFRVDGDMVPHISRQRLTKYTMADLVYALRHFDEGNCDTLKEILVTYNCCDDDYFNKKDWYDFVENPDILRVYANLGERVRQSLLKTVQFCDAMRDAGIVGVLTLDNQDLNGNWYDFGDFVQVAPGCGVPIVDSYYSLLMPILTLTRALAAESHMDADLAKPLIKWDLLKYDFTEERLCLFDRYFKYWDQTYHPNCINCLDDRCILHCANFNVLFSTVFPPTSFGPLVRKIFVDGVPFVVSTGYHFRELGVVHNQDVNLHSSRLSFKELLVYAADPAMHAASGNLLLDKRTTCFSVAALTNNVAFQTVKPGNFNKDFYDFAVSKGFFKEGSSVELKHFFFAQDGNAAISDYDYYRYNLPTMCDIRQLLFVVEVVDKYFDCYDGGCINANQVIVNNLDKSAGFPFNKWGKARLYYDSMSYEDQDALFAYTKRNVIPTITQMNLKYAISAKNRARTVAGVSICSTMTNRQFHQKLLKSIAATRGATVVIGTSKFYGGWHNMLKTVYSDVETPHLMGWDYPKCDRAMPNMLRIMASLVLARKHNTCCNLSHRFYRLANECAQVLSEMVMCGGSLYVKPGGTSSGDATTAYANSVFNICQAVTANVNALLSTDGNKIADKYVRNLQHRLYECLYRNRDVDHEFVDEFYAYLRKHFSMMILSDDAVVCYNSNYAAQGLVASIKNFKAVLYYQNNVFMSEAKCWTETDLTKGPHEFCSQHTMLVKQGDDYVYLPYPDPSRILGAGCFVDDIVKTDGTLMIERFVSLAIDAYPLTKHPNQEYADVFHLYLQYIRKLHDELTGHMLDMYSVMLTNDNTSRYWEPEFYEAMYTPHTVLQAVGACVLCNSQTSLRCGACIRRPFLCCKCCYDHVISTSHKLVLSVNPYVCNAPGCDVTDVTQLYLGGMSYYCKSHKPPISFPLCANGQVFGLYKNTCVGSDNVTDFNAIATCDWTNAGDYILANTCTERLKLFAAETLKATEETFKLSYGIATVREVLSDRELHLSWEVGKPRPPLNRNYVFTGYRVTKNSKVQIGEYTFEKGDYGDAVVYRGTTTYKLNVGDYFVLTSHTVMPLSAPTLVPQEHYVRITGLYPTLNISDEFSSNVANYQKVGMQKYSTLQGPPGTGKSHFAIGLALYYPSARIVYTACSHAAVDALCEKALKYLPIDKCSRIIPARARVECFDKFKVNSTLEQYVFCTVNALPETTADIVVFDEISMATNYDLSVVNARLRAKHYVYIGDPAQLPAPRTLLTKGTLEPEYFNSVCRLMKTIGPDMFLGTCRRCPAEIVDTVSALVYDNKLKAHKDKSAQCFKMFYKGVITHDVSSAINRPQIGVVREFLTRNPAWRKAVFISPYNSQNAVASKILGLPTQTVDSSQGSEYDYVIFTQTTETAHSCNVNRFNVAITRAKIGILCIMSDRDLYDKLQFTSLEIPRRNVATLQAENVTGLFKDCSKIITGLHPTQAPTHLSVDIKFKTEGLCVDIPGIPKDMTYRRLISMMGFKMNYQVNGYPNMFITREEAIRHVRAWIGFDVEGCHATRDAVGTNLPLQLGFSTGVNLVAVPTGYVDTENNTEFTRVNAKPPPGDQFKHLIPLMYKGLPWNVVRIKIVQMLSDTLKGLSDRVVFVLWAHGFELTSMKYFVKIGPERTCCLCDKRATCFSTSSDTYACWNHSVGFDYVYNPFMIDVQQWGFTGNLQSNHDQHCQVHGNAHVASCDAIMTRCLAVHECFVKRVDWSVEYPIIGDELRVNSACRKVQHMVVKSALLADKFPVLHDIGNPKAIKCVPQAEVEWKFYDAQPCSDKAYKIEELFYSYATHHDKFTDGVCLFWNCNVDRYPANAIVCRFDTRVLSNLNLPGCDGGSLYVNKHAFHTPAFDKSAFTNLKQLPFFYYSDSPCESHGKQVVSDIDYVPLKSATCITRCNLGGAVCRHHANEYRQYLDAYNMMISAGFSLWIYKQFDTYNLWNTFTRLQSLENVAYNVVNKGHFDGHAGEAPVSIINNAVYTKVDGIDVEIFENKTTLPVNVAFELWAKRNIKPVPEIKILNNLGVDIAANTVIWDYKREAPAHVSTIGVCTMTDIAKKPTESACSSLTVLFDGRVEGQVDLFRNARNGVLITEGSVKGLTPSKGPAQASVNGVTLIGESVKTQFNYFKKVDGIIQQLPETYFTQSRDLEDFKPRSQMETDFLELAMDEFIQRYKLEGYAFEHIVYGDFSHGQLGGLHLMIGLAKRSQDSPLKLEDFIPMDSTVKNYFITDAQTGSSKCVCSVIDLLLDDFVEIIKSQDLSVISKVVKVTIDYAEISFMLWCKDGHVETFYPKLQASRAWQPGVAMPNLYKMQRMLLEKCDLQNYGENAVIPKGIMMNVAKYTQLCQYLNTLTLAVPYNMRVIHFGAGSDKGVAPGTAVLRQWLPTGTLLVDSDLNDFVSDAYSTLIGDCATVHTANKWDLIISDMYDPRTKHVTKENDSKEGFFTYLCGFIKQKLALGGSIAVKITEHSWNADLYKLMGHFSWWTAFVTNVNASSSEAFLIGANYLGKPKEQIDGYTMHANYIFWRNTNPIQLSSYSLFDMSKFPLKLRGTAVMSLKENQINDMIYSLLEKGRLIIRENNRVVVSSDILVNN

SEQ ID NO: 7251 - protein, 7071 aa, SARS coronavirus
MESLVLGVNEKTHVQLSLPVLQVRDVLVRGFGDSVEEALSEAREHLKNGTCGLVELEKGVLPQLEQPYVFIKRSDALSTNHGHKVVELVAEMDGIQYGRSGITLGVLVPHVGETPIAYRNVLLRKNGNKGAGGHSYGIDLKSYDLGDELGTDPIEDYEQNWNTKHGSGALRELTRELNGGAVTRYVDNNFCGPDGYPLDCIKDFLARAGKSMCTLSEQLDYIESKRGVYCCRDHEHEIAWFTERSDKSYEHQTPFEIKSAKKFDTFKGECPKFVFPLNSKVKVIQPRVEKKKTEGFMGRIRSVYPVASPQECNNMHLSTLMKCNHCDEVSWQTCDFLKATCEHCGTENLVIEGPTTCGYLPTNAVVKMPCPACQDPEIGPEHSVADYHNHSNIETRLRKGGRTRCFGGCVFAYVGCYNKRAYWVPRASADIGSGHTGITGDNVETLNEDLLEILSRERVNINIVGDFHLNEEVAIILASFSASTSAFIDTIKSLDYKSFKTIVESCGNYKVTKGKPVKGAWNIGQQRSVLTPLCGFPSQAAGVIRSIFARTLDAANHSIPDLQRAAVTILDGISEQSLRLVDAMVYTSDLLTNSVIIMAYVTGGLVQQTSQWLSNLLGTTVEKLRPIFEWIEAKLSAGVEFLKDAWEILKFLITGVFDIVKGQIQVASDNIKDCVKCFIDVVNKALEMCIDQVTIAGAKLRSLNLGEVFIAQSKGLYRQCIRGKEQLQLLMPLKAPKEVTFLEGDSHDTVLTSEEVVLKNGELEALETPVDSFTNGAIVGTPVCVNGLMLLEIKDKEQYCALSPGLLATNNVFRLKGGAPIKGVTFGEDTVWEVQGYKNVRITFELDERVDKVLNEKCSVYTVESGTEVTEFACVVAEAVVKTLQPVSDLLTNMGIDLDEWSVATFYLFDDAGEENFSSRMYCSFYPPDEEEEDDAECEEEEIDETCEHEYGTEDDYQGLPLEFGASAETVRVEEEEEEDWLDDTTEQSEIEPEPEPTPEEPVNQFTGYLKLTDNVAIKCVDIVKEAQSANPMVIVNAANIHLKHGGGVAGALNKATNGAMQKESDDYIKLNGPLTVGGSCLLSGHNLAKKCLHVVGPNLNAGEDIQLLKAAYENFNSQDILLAPLLSAGIFGAKPLQSLQVCVQTVRTQVYIAVNDKALYEQVVMDYLDNLKPRVEAPKQEEPPNTEDSKTEEKSVVQKPVDVKPKIKACIDEVTTTLEETKFLTNKLLLFADINGKLYHDSQNMLRGEDMSFLEKDAPYMVGDVITSGDITCVVIPSKKAGGTTEMLSRALKKVPVDEYITTYPGQGCAGYTLEEAKTALKKCKSAFYVLPSEAPNAKEEILGTVSWNLREMLAHAEETRKLMPICMDVRAIMATIQRKYKGIKIQEGIVDYGVRFFFYTSKEPVASIITKLNSLNEPLVTMPIGYVTHGFNLEEAARCMRSLKAPAVVSVSSPDAVTTYNGYLTSSSKTSEEHFVETVSLAGSYRDWSYSGQRTELGVEFLKRGDKIVYHTLESPVEFHLDGEVLSLDKLKSLLSLREVKTIKVFTTVDNTNLHTQLVDMSMTYGQQFGPTYLDGADVTKIKPHVNHEGKTFFVLPSDDTLRSEAFEYYHTLDESFLGRYMSALNHTKKWKFPQVGGLTSIKWADNNCYLSSVLLALQQLEVKFNAPALQEAYYRARAGDAANFCALILAYSNKTVGELGDVRETMTHLLQHANLESAKRVLNVVCKHCGQKTTTLTGVEAVMYMGTLSYDNLKTGVSIPCVCGRDATQYLVQQESSFVMMSAPPAEYKLQQGTFLCANEYTGNYQCGHYTHITAKETLYRIDGAHLTKMSEYKGPVTDVFYKETSYTTTIKPVSYKLDGVTYTEIEPKLDGYYKKDNAYYTEQPIDLVPTQPLPNASFDNFKLTCSNTKFADDLNQMTGFTKPASRELSVTFFPDLNGDVVAIDYRHYSASFKKGAKLLHKPIVWHINQATTKTTFKPNTWCLRCLWSTKPVDTSNSFEVLAVEDTQGMDNLACESQQPTSEEVVENPTIQKEVIECDVKTTEVVGNVILKPSDEGVKVTQELGHEDLMAAYVENTSITIKKPNELSLALGLKTIATHGIAAINSVPWSKILAYVKPFLGQAAITTSNCAKRLAQRVFNNYMPYVFTLLFQLCTFTKSTNSRIRASLPTTIAKNSVKSVAKLCLDAGINYVKSPKFSKLFTIAMWLLLLSICLGSLICVTAAFGVLLSNFGAPSYCNGVRELYLNSSNVTTMDFCEGSFPCSICLSGLDSLDSYPALETIQVTISSYKLDLTILGLAAEWVLAYMLFTKFFYLLGLSAIMQVFFGYFASHFISNSWLMWFIISIVQMAPVSAMVRMYIFFASFYYIWKSYVHIMDGCTSSTCMMCYKRNRATRVECTTIVNGMKRSFYVYANGGRGFCKTHNWNCLNCDTFCTGSTFISDEVARDLSLQFKRPINPTDQSSYIVDSVAVKNGALHLYFDKAGQKTYERHPLSHFVNLDNLRANNTKGSLPINVIVFDGKSKCDESASKSASVYYSQLMCQPILLLDQALVSDVGDSTEVSVKMFDAYVDTFSATFSVPMEKLKALVATAHSELAKGVALDGVLSTFVSAARQGVVDTDVDTKDVIECLKLSHHSDLEVTGDSCNNFMLTYNKVENMTPRDLGACIDCNARHINAQVAKSHNVSLIWNVKDYMSLSEQLRKQIRSAAKKNNIPFRLTCATTRQVVNVITTKISLKGGKIVSTCFKLMLKATLLCVLAALVCYIVMPVHTLSIHDGYTNEIIGYKAIQDGVTRDIISTDDCFANKHAGFDAWFSQRGGSYKNDKSCPVVAAIITREIGFIVPGLPGTVLRAINGDFLHFLPRVFSAVGNICYTPSKLIEYSDFATSACVLAAECTIFKDAMGKPVPYCYDTNLLEGSISYSELRPDTRYVLMDGSIIQFPNTYLEGSVRVVTTFDAEYCRHGTCERSEVGICLSTSGRWVLNNEHYRALSGVFCGVDAMNLIANIFTPLVQPVGALDVSASVVAGGIIAILVTCAAYYFMKFRRVFGEYNHVVAANALLFLMSFTILCLVPAYSFLPGVYSVFYLYLTFYFTNDVSFLAHLQWFAMFSPIVPFWITAIYVFCISLKHCHWFFNNYLRKRVMFNGVTFSTFEEAALCTFLLNKEMYLKLRSETLLPLTQYNRYLALYNKYKYFSGALDTTSYREAACCHLAKALNDFSNSGADVLYQPPQTSITSAVLQSGFRKMAFPSGKVEGCMVQVTCGTTTLNGLWLDDTVYCPRHVICTAEDMLNPNYEDLLIRKSNHSFLVQAGNVQLRVIGHSMQNCLLRLKVDTSNPKTPKYKFVRIQPGQTFSVLACYNGSPSGVYQCAMRPNHTIKGSFLNGSCGSVGFNIDYDCVSFCYMHHMELPTGVHAGTDLEGKFYGPFVDRQTAQAAGTDTTITLNVLAWLYAAVINGDRWFLNRFTTTLNDFNLVAMKYNYEPLTQDHVDILGPLSAQTGIAVLDMCAALKELLQNGMNGRTILGSTILEDEFTPFDVVRQCSGVTFQGKFKKIVKGTHHWMLLTFLTSLLILVQSTQWSLFFFVYENAFLPFTLGIMAIAACAMLLVKHKHAFLCLFLLPSLATVAYFNMVYMPASWVMRIMTWLELADTSLSGYRLKDCVMYASALVLLILMTARTVYDDAARRVWTLMNVITLVYKVYYGNALDQAISMWALVISVTSNYSGVVTTIMFLARAIVFVCVEYYPLLFITGNTLQCIMLVYCFLGYCCCCYFGLFCLLNRYFRLTLGVYDYLVSTQEFRYMNSQGLLPPKSSIDAFKLNIKLLGIGGKPCIKVATVQSKMSDVKCTSVVLLSVLQQLRVESSSKLWAQCVQLHNDILLAKDTTEAFEKMVSLLSVLLSMQGAVDINRLCEEMLDNRATLQAIASEFSSLPSYAAYATAQEAYEQAVANGDSEVVLKKLKKSLNVAKSEFDRDAAMQRKLEKMADQAMTQMYKQARSEDKRAKVTSAMQTMLFTMLRKLDNDALNNIINNARDGCVPLNIIPLTTAAKLMVVVPDYGTYKNTCDGNTFTYASALWEIQQVVDADSKIVQLSEINMDNSPNLAWPLIVTALRANSAVKLQNNELSPVALRQMSCAAGTTQTACTDDNALAYYNNSKGGRFVLALLSDHQDLKWARFPKSDGTGTIYTELEPPCRFVTDTPKGPKVKYLYFIKGLNNLNRGMVLGSLAATVRLQAGNATEVPANSTVLSFCAFAVDPAKAYKDYLASGGQPITNCVKMLCTHTGTGQAITVTPEANMDQESFGGASCCLYCRCHIDHPNPKGFCDLKGKYVQIPTTCANDPVGFTLRNTVCTVCGMWKGYGCSCDQLREPLMQSADASTFLNRGVSAARLTPCGTGTSTDVVYRAFDIYNEKVAGFAKFLKTNCCRFQEKDEEGNLLDSYFVVKRHTMSNYQHEETIYNLVKDCPAVAVHDFFKFRVDGDMVPHISRQRLTKYTMADLVYALRHFDEGNCDTLKEILVTYNCCDDDYFNKKDWYDFVENPDILRVYANLGERVRQSLLKTVQFCDAMRDAGIVGVLTLDNQDLNGNWYDFGDFVQVAPGCGVPIVDSYYSLLMPILTLTRALAAESHMDADLAKPLIKWDLLKYDFTEERLCLFDRYFKYWDQTYHPNCINCLDDRCILHCANFNVLFSTVFPPTSFGPLVRKIFVDGVPFVVSTGYHFRELGVVHNQDVNLHSSRLSFKELLVYAADPAMHAASGNLLLDKRTTCFSVAALTNNVAFQTVKPGNFNKDFYDFAVSKGFFKEGSSVELKHFFFAQDGNAAISDYDYYRYNLPTMCDIRQLLFVVEVVDKYFDCYDGGCINANQVIVNNLDKSAGFPFNKWGKARLYYDSMSYEDQDALFAYTKRNVIPTITQMNLKYAISAKNRARTVAGVSICSTMTNRQFHQKLLKSIAATRGATVVIGTSKFYGGWHNMLKTVYSDVETPHLMGWDYPKCDRAMPNMLRIMASLVLARKHNTCCNLSHRFYRLANECAQVLSEMVMCGGSLYVKPGGTSSGDATTAYANSVFNICQAVTANVNALLSTDGNKIADKYVRNLQHRLYECLYRNRDVDHEFVDEFYAYLRKHFSMMILSDDAVVCYNSNYAAQGLVASIKNFKAVLYYQNNVFMSEAKCWTETDLTKGPHEFCSQHTMLVKQGDDYVYLPYPDPSRILGAGCFVDDIVKTDGTLMIERFVSLAIDAYPLTKHPNQEYADVFHLYLQYIRKLHDELTGHMLDMYSVMLTNDNTSRYWEPEFYEAMYTPHTVLQAVGACVLCNSQTSLRCGACIRRPFLCCKCCYDHVISTSHKLVLSVNPYVCNAPGCDVTDVTQLYLGGMSYYCKSHKPPISFPLCANGQVFGLYKNTCVGSDNVTDFNAIATCDWTNAGDYILANTCTERLKLFAAETLKATEETFKLSYGIATVREVLSDRELHLSWEVGKPRPPLNRNYVFTGYRVTKNSKVQIGEYTFEKGDYGDAVVYRGTTTYKLNVGDYFVLTSHTVMPLSAPTLVPQEHYVRITGLYPTLNISDEFSSNVANYQKVGMQKYSTLQGPPGTGKSHFAIGLALYYPSARIVYTACSHAAVDALCEKALKYLPIDKCSRIIPARARVECFDKFKVNSTLEQYVFCTVNALPETTADIVVFDEISMATNYDLSVVNARLRAKHYVYIGDPAQLPAPRTLLTKGTLEPEYFNSVCRLMKTIGPDMFLGTCRRCPAEIVDTVSALVYDNKLKAHKDKSAQCFKMFYKGVITHDVSSAINRPQIGVVREFLTRNPAWRKAVFISPYNSQNAVASKILGLPTQTVDSSQGSEYDYVIFTQTTETAHSCNVNRFNVAITRAKIGILCIMSDRDLYDKLQFTSLEIPRRNVATLQAENVTGLFKDCSKIITGLHPTQAPTHLSVDIKFKTEGLCVDIPGIPKDMTYRRLISMMGFKMNYQVNGYPNMFITREEAIRHVRAWIGFDVEGCHATRDAVGTNLPLQLGFSTGVNLVAVPTGYVDTENNTEFTRVNAKPPPGDQFKHLIPLMYKGLPWNVVRIKIVQMLSDTLKGLSDRVVFVLWAHGFELTSMKYFVKIGPERTCCLCDKRATCFSTSSDTYACWNHSVGFDYVYNPFMIDVQQWGFTGNLQSNHDQHCQVHGNAHVASCDAIMTRCLAVHECFVKRVDWSVEYPIIGDELRVNSACRKVQHMVVKSALLADKFPVLHDIGNPKAIKCVPQAEVEWKFYDAQPCSDKAYKIEELFYSYATHHDKFTDGVCLFWNCNVDRYPANAIVCRFDTRVLSNLNLPGCDGGSLYVNKHAFHTPAFDKSAFTNLKQLPFFYYSDSPCESHGKQVVSDIDYVPLKSATCITRCNLGGAVCRHHANEYRQYLDAYNMMISAGFSLWIYKQFDTYNLWNTFTRLQSLENVAYNVVNKGHFDGHAGEAPVSIINNAVYTKVDGIDVEIFENKTTLPVNVAFELWAKRNIKPVPEIKILNNLGVDIAANTVIWDYKREAPAHVSTIGVCTMTDIAKKPTESACSSLTVLFDGRVEGQVDLFRNARNGVLITEGSVKGLTPSKGPAQASVNGVTLIGESVKTQFNYFKKVDGIIQQLPETYFTQSRDLEDFKPRSQMETDFLELAMDEFIQRYKLEGYAFEHIVYGDFSHGQLGGLHLMIGLAKRSQDSPLKLEDFIPMDSTVKNYFITDAQTGSSKCVCSVIDLLLDDFVEIIKSQDLSVISKVVKVTIDYAEISFMLWCKDGHVETFYPKLQASRAWQPGVAMPNLYKMQRMLLEKCDLQNYGENAVIPKGIMMNVAKYTQLCQYLNTLTLAVPYNMRVIHFGAGSDKGVAPGTAVLRQWLPTGTLLVDSDLNDFVSDAYSTLIGDCATVHTANKWDLIISDMYDPRTKHVTKENDSKEGFFTYLCGFIKQKLALGGSIAVKITEHSWNADLYKLMGHFSWWTAFVTNVNASSSEAFLIGANYLGKPKEQIDGYTMHANYIFWRNTNPIQLSSYSLFDMSKFPLKLRGTAVMSLKENQINDMIYSLLEKGRLIIRENNRVVVSSDILVNN

SEQ ID NO: 7252 - protein, 7072 aa, SARS coronavirus
MESLVLGVNEKTHVQLSLPVLQVRDVLVRGFGDSVEEALSEAREHLKNGTCGLVELEKGVLPQLEQPYVFIKRSDALSTNHGHKVVELVAEMDGIQYGRSGITLGVLVPHVGETPIAYRNVLLRKNGNKGAGGHSYGIDLKSYDLGDELGTDPIEDYEQNWNTKHGSGALRELTRELNGGAVTRYVDNNFCGPDGYPLDCIKDFLARAGKSMCTLSEQLDYIESKRGVYCCRDHEHEIAWFTERSDKSYEHQTPFEIKSAKKFDTFKGECPKFVFPLNSKVKVIQPRVEKKKTEGFMGRIRSVYPVASPQECNNMHLSTLMKCNHCDEVSWQTCDFLKATCEHCGTENLVIEGPTTCGYLPTNAVVKMPCPACQDPEIGPEHSVADYHNHSNIETRLRKGGRTRCFGGCVFAYVGCYNKRAYWVPRASADIGSGHTGITGDNVETLNEDLLEILSRERVNINIVGDFHLNEEVAIILASFSASTSAFIDTIKSLDYKSFKTIVESCGNYKVTKGKPVKGAWNIGQQRSVLTPLCGFPSQAAGVIRSIFARTLDAANHSIPDLQRAAVTILDGISEQSLRLVDAMVYTSDLLTNSVIIMAYVTGGLVQQTSQWLSNLLGTTVEKLRPIFEWIEAKLSAGVEFLKDAWEILKFLITGVFDIVKGQIQVASDNIKDCVKCFIDVVNKALEMCIDQVTIAGAKLRSLNLGEVFIAQSKGLYRQCIRGKEQLQLLMPLKAPKEVTFLEGDSHDTVLTSEEVVLKNGELEALETPVDSFTNGAIVGTPVCVNGLMLLEIKDKEQYCALSPGLLATNNVFRLKGGAPIKGVTFGEDTVWEVQGYKNVRITFELDERVDKVLNEKCSVYTVESGTEVTEFACVVAEAVVKTLQPVSDLLTNMGIDLDEWSVATFYLFDDAGEENFSSRMYCSFYPPDEEEEDDAECEEEEIDETCEHEYGTEDDYQGLPLEFGASAETVRVEEEEEEDWLDDTTEQSEIEPEPEPTPEEPVNQFTGYLKLTDNVAIKCVDIVKEAQSANPMVIVNAANIHLKHGGGVAGALNKATNGAMQKESDDYIKLNGPLTVGGSCLLSGHNLAKKCLHVVGPNLNAGEDIQLLKAAYENFNSQDILLAPLLSAGIFGAKPLQSLQVCVQTVRTQVYIAVNDKALYEQVVMDYLDNLKPRVEAPKQEEPPNTEDSKTEEKSVVQKPVDVKPKIKACIDEVTTTLEETKFLTNKLLLFADINGKLYHDSQNMLRGEDMSFLEKDAPYMVGDVITSGDITCVVIPSKKAGGTTEMLSRALKKVPVDEYITTYPGQGCAGYTLEEAKTALKKCKSAFYVLPSEAPNAKEEILGTVSWNLREMLAHAEETRKLMPICMDVRAIMATIQRKYKGIKIQEGIVDYGVRFFFYTSKEPVASIITKLNSLNEPLVTMPIGYVTHGFNLEEAARCMRSLKAPAVVSVSSPDAVTTYNGYLTSSSKTSEEHFVETVSLAGSYRDWSYSGQRTELGVEFLKRGDKIVYHTLESPVEFHLDGEVLSLDKLKSLLSLREVKTIKVFTTVDNTNLHTQLVDMSMTYGQQFGPTYLDGADVTKIKPHVNHEGKTFFVLPSDDTLRSEAFEYYHTLDESFLGRYMSALNHTKKWKFPQVGGLTSIKWADNNCYLSSVLLALQQLEVKFNAPALQEAYYRARAGDAANFCALILAYSNKTVGELGDVRETMTHLLQHANLESAKRVLNVVCKHCGQKTTTLTGVEAVMYMGTLSYDNLKTGVSIPCVCGRDATQYLVQQESSFVMMSAPPAEYKLQQGTFLCANEYTGNYQCGHYTHITAKETLYRIDGAHLTKMSEYKGPVTDVFYKETSYTTTIKPVSYKLDGVTYTEIEPKLDGYYKKDNAYYTEQPIDLVPTQPLPNASFDNFKLTCSNTKFADDLNQMTGFTKPASRELSVTFFPDLNGDVVAIDYRHYSASFKKGAKLLHKPIVWHINQATTKTTFKPNTWCLRCLWSTKPVDTSNSFEVLAVEDTQGMDNLACESQQPTSEEVVENPTIQKEVIECDVKTTEVVGNVILKPSDEGVKVTQELGHEDLMAAYVENTSITIKKPNELSLALGLKTIATHGIAAINSVPWSKILAYVKPFLGQAAITTSNCAKRLAQRVFNNYMPYVFTLLFQLCTFTKSTNSRIRASLPTTIAKNSVKSVAKLCLDAGINYVKSPKFSKLFTIAMWLLLLSICLGSLICVTAAFGVLLSNFGAPSYCNGVRELYLNSSNVTTMDFCEGSFPCSICLSGLDSLDSYPALETIQVTISSYKLDLTILGLAAEWVLAYMLFTKFFYLLGLSAIMQVFFGYFASHFISNSWLMWFIISIVQMAPVSAMVRMYIFFASFYYIWKSYVHIMDGCTSSTCMMCYKRNRATRVECTTIVNGMKRSFYVYANGGRGFCKTHNWNCLNCDTFCTGSTFISDEVARDLSLQFKRPINPTDQSSYIVDSVAVKNGALHLYFDKAGQKTYERHPLSHFVNLDNLRANNTKGSLPINVIVFDGKSKCDESASKSASVYYSQLMCQPILLLDQALVSDVGDSTEVSVKMFDAYVDTFSATFSVPMEKLKALVATAHSELAKGVALDGVLSTFVSAARQGVVDTDVDTKDVIECLKLSHHSDLEVTGDSCNNFMLTYNKVENMTPRDLGACIDCNARHINAQVAKSHNVSLIWNVKDYMSLSEQLRKQIRSAAKKNNIPFRLTCATTRQVVNVITTKISLKGGKIVSTCFKLMLKATLLCVLAALVCYIVMPVHTLSIHDGYTNEIIGYKAIQDGVTRDIISTDDCFANKHAGFDAWFSQRGGSYKNDKSCPVVAAIITREIGFIVPGLPGTVLRAINGDFLHFLPRVFSAVGNICYTPSKLIEYSDFATSACVLAAECTIFKDAMGKPVPYCYDTNLLEGSISYSELRPDTRYVLMDGSIIQFPNTYLEGSVRVVTTFDAEYCRHGTCERSEVGICLSTSGRWVLNNEHYRALSGVFCGVDAMNLIANIFTPLVQPVGALDVSASVVAGGIIAILVTCAAYYFMKFRRVFGEYNHVVAANALLFLMSFTILCLVPAYSFLPGVYSVFYLYLTFYFTNDVSFLAHLQWFAMFSPIVPFWITAIYVFCISLKHCHWFFNNYLRKRVMFNGVTFSTFEEAALCTFLLNKEMYLKLRSETLLPLTQYNRYLALYNKYKYFSGALDTTSYREAACCHLAKALNDFSNSGADVLYQPPQTSITSAVLQSGFRKMAFPSGKVEGCMVQVTCGTTTLNGLWLDDTVYCPRHVICTAEDMLNPNYEDLLIRKSNHSFLVQAGNVQLRVIGHSMQNCLLRLKVDTSNPKTPKYKFVRIQPGQTFSVLACYNGSPSGVYQCAMRPNHTIKGSFLNGSCGSVGFNIDYDCVSFCYMHHMELPTGVHAGTDLEGKFYGPFVDRQTAQAAGTDTTITLNVLAWLYAAVINGDRWFLNRFTTTLNDFNLVAMKYNYEPLTQDHVDILGPLSAQTGIAVLDMCAALKELLQNGMNGRTILGSTILEDEFTPFDVVRQCSGVTFQGKFKKIVKGTHHWMLLTFLTSLLILVQSTQWSLFFFVYENAFLPFTLGIMAIAACAMLLVKHKHAFLCLFLLPSLATVAYFNMVYMPASWVMRIMTWLELADTSLSGYRLKDCVMYASALVLLILMTARTVYDDAARRVWTLMNVITLVYKVYYGNALDQAISMWALVISVTSNYSGVVTTIMFLARAIVFVCVEYYPLLFITGNTLQCIMLVYCFLGYCCCCYFGLFCLLNRYFRLTLGVYDYLVSTQEFRYMNSQGLLPPKSSIDAFKLNIKLLGIGGKPCIKVATVQSKMSDVKCTSVVLLSVLQQLRVESSSKLWAQCVQLHNDILLAKDTTEAFEKMVSLLSVLLSMQGAVDINRLCEEMLDNRATLQAIASEFSSLPSYAAYATAQEAYEQAVANGDSEVVLKKLKKSLNVAKSEFDRDAAMQRKLEKMADQAMTQMYKQARSEDKRAKVTSAMQTMLFTMLRKLDNDALNNIINNARDGCVPLNIIPLTTAAKLMVVVPDYGTYKNTCDGNTFTYASALWEIQQVVDADSKIVQLSEINMDNSPNLAWPLIVTALRANSAVKLQNNELSPVALRQMSCAAGTTQTACTDDNALAYYNNSKGGRFVLALLSDHQDLKWARFPKSDGTGTIYTELEPPCRFVTDTPKGPKVKYLYFIKGLNNLNRGMVLGSLAATVRLQAGNATEVPANSTVLSFCAFAVDPAKAYKDYLASGGQPITNCVKMLCTHTGTGQAITVTPEANMDQESFGGASCCLYCRCHIDHPNPKGFCDLKGKYVQIPTTCANDPVGFTLRNTVCTVCGMWKGYGCSCDQLREPLMQSADASTFLNRVGVSAARLTPCGTGTSTDVVYRAFDIYNEKVAGFAKFLKTNCCRFQEKDEEGNLLDSYFVVKRHTMSNYQHEETIYNLVKDCPAVAVHDFFKFRVDGDMVPHISRQRLTKYTMADLVYALRHFDEGNCDTLKEILVTYNCCDDDYFNKKDWYDFVENPDILRVYANLGERVRQSLLKTVQFCDAMRDAGIVGVLTLDNQDLNGNWYDFGDFVQVAPGCGVPIVDSYYSLLMPILTLTRALAAESHMDADLAKPLIKWDLLKYDFTEERLCLFDRYFKYWDQTYHPNCINCLDDRCILHCANFNVLFSTVFPPTSFGPLVRKIFVDGVPFVVSTGYHFRELGVVHNQDVNLHSSRLSFKELLVYAADPAMHAASGNLLLDKRTTCFSVAALTNNVAFQTVKPGNFNKDFYDFAVSKGFFKEGSSVELKHFFFAQDGNAAISDYDYYRYNLPTMCDIRQLLFVVEVVDKYFDCYDGGCINANQVIVNNLDKSAGFPFNKWGKARLYYDSMSYEDQDALFAYTKRNVIPTITQMNLKYAISAKNRARTVAGVSICSTMTNRQFHQKLLKSIAATRGATVVIGTSKFYGGWHNMLKTVYSDVETPHLMGWDYPKCDRAMPNMLRIMASLVLARKHNTCCNLSHRFYRLANECAQVLSEMVMCGGSLYVKPGGTSSGDATTAYANSVFNICQAVTANVNALLSTDGNKIADKYVRNLQHRLYECLYRNRDVDHEFVDEFYAYLRKHFSMMILSDDAVVCYNSNYAAQGLVASIKNFKAVLYYQNNVFMSEAKCWTETDLTKGPHEFCSQHTMLVKQGDDYVYLPYPDPSRILGAGCFVDDIVKTDGTLMIERFVSLAIDAYPLTKHPNQEYADVFHLYLQYIRKLHDELTGHMLDMYSVMLTNDNTSRYWEPEFYEAMYTPHTVLQAVGACVLCNSQTSLRCGACIRRPFLCCKCCYDHVISTSHKLVLSVNPYVCNAPGCDVTDVTQLYLGGMSYYCKSHKPPISFPLCANGQVFGLYKNTCVGSDNVTDFNAIATCDWTNAGDYILANTCTERLKLFAAETLKATEETFKLSYGIATVREVLSDRELHLSWEVGKPRPPLNRNYVFTGYRVTKNSKVQIGEYTFEKGDYGDAVVYRGTTTYKLNVGDYFVLTSHTVMPLSAPTLVPQEHYVRITGLYPTLNISDEFSSNVANYQKVGMQKYSTLQGPPGTGKSHFAIGLALYYPSARIVYTACSHAAVDALCEKALKYLPIDKCSRIIPARARVECFDKFKVNSTLEQYVFCTVNALPETTADIVVFDEISMATNYDLSVVNARLRAKHYVYIGDPAQLPAPRTLLTKGTLEPEYFNSVCRLMKTIGPDMFLGTCRRCPAEIVDTVSALVYDNKLKAHKDKSAQCFKMFYKGVITHDVSSAINRPQIGVVREFLTRNPAWRKAVFISPYNSQNAVASKILGLPTQTVDSSQGSEYDYVIFTQTTETAHSCNVNRFNVAITRAKIGILCIMSDRDLYDKLQFTSLEIPRRNVATLQAENVTGLFKDCSKIITGLHPTQAPTHLSVDIKFKTEGLCVDIPGIPKDMTYRRLISMMGFKMNYQVNGYPNMFITREEAIRHVRAWIGFDVEGCHATRDAVGTNLPLQLGFSTGVNLVAVPTGYVDTENNTEFTRVNAKPPPGDQFKHLIPLMYKGLPWNVVRIKIVQMLSDTLKGLSDRVVFVLWAHGFELTSMKYFVKIGPERTCCLCDKRATCFSTSSDTYACWNHSVGFDYVYNPFMIDVQQWGFTGNLQSNHDQHCQVHGNAHVASCDAIMTRCLAVHECFVKRVDWSVEYPIIGDELRVNSACRKVQHMVVKSALLADKFPVLHDIGNPKAIKCVPQAEVEWKFYDAQPCSDKAYKIEELFYSYATHHDKFTDGVCLFWNCNVDRYPANAIVCRFDTRVLSNLNLPGCDGGSLYVNKHAFHTPAFDKSAFTNLKQLPFFYYSDSPCESHGKQVVSDIDYVPLKSATCITRCNLGGAVCRHHANEYRQYLDAYNMMISAGFSLWIYKQFDTYNLWNTFTRLQSLENVAYNVVNKGHFDGHAGEAPVSIINNAVYTKVDGIDVEIFENKTTLPVNVAFELWAKRNIKPVPEIKILNNLGVDIAANTVIWDYKREAPAHVSTIGVCTMTDIAKKPTESACSSLTVLFDGRVEGQVDLFRNARNGVLITEGSVKGLTPSKGPAQASVNGVTLIGESVKTQFNYFKKVDGIIQQLPETYFTQSRDLEDFKPRSQMETDFLELAMDEFIQRYKLEGYAFEHIVYGDFSHGQLGGLHLMIGLAKRSQDSPLKLEDFIPMDSTVKNYFITDAQTGSSKCVCSVIDLLLDDFVEIIKSQDLSVISKVVKVTIDYAEISFMLWCKDGHVETFYPKLQASRAWQPGVAMPNLYKMQRMLLEKCDLQNYGENAVIPKGIMMNVAKYTQLCQYLNTLTLAVPYNMRVIHFGAGSDKGVAPGTAVLRQWLPTGTLLVDSDLNDFVSDAYSTLIGDCATVHTANKWDLIISDMYDPRTKHVTKENDSKEGFFTYLCGFIKQKLALGGSIAVKITEHSWNADLYKLMGHFSWWTAFVTNVNASSSEAFLIGANYLGKPKEQIDGYTMHANYIFWRNTNPIQLSSYSLFDMSKFPLKLRGTAVMSLKENQINDMIYSLLEKGRLIIRENNRVVVSSDILVNN

SEQ ID NO: 7253 - protein, 7073 aa, SARS coronavirus; identical to SEQ ID NO: 7232

SEQ ID NO: 7254 - protein, 11 aa, SARS coronavirus
HGIAAINSVPW

SEQ ID NO: 7255 - protein, 4 aa, SARS coronavirus
NKTG

SEQ ID NO: 7256 - protein, 4 aa, SARS coronavirus
NLTL

SEQ ID NO: 7257 - protein, 4 aa, SARS coronavirus
NLSH

SEQ ID NO: 7258 - protein, 4 aa, SARS coronavirus
NTSR

SEQ ID NO: 7259 - protein, 4 aa, SARS coronavirus
NVTD

SEQ ID NO: 7260 - protein, 4 aa, SARS coronavirus
NISD

SEQ ID NO: 7261 - protein, 4 aa, SARS coronavirus
NSTL

SEQ ID NO: 7262 - protein, 4 aa, SARS coronavirus
NVTG

SEQ ID NO: 7263 - protein, 4 aa, SARS coronavirus
NHSV

SEQ ID NO: 7264 - protein, 4 aa, SARS coronavirus
NKTT

SEQ ID NO: 7265 - protein, 4 aa, SARS coronavirus
NATF

SEQ ID NO: 7266 - protein, 4 aa, SARS coronavirus
NVSL

SEQ ID NO: 7267 - protein, 4 aa, SARS coronavirus
NSSE

SEQ ID NO: 7268 - protein, 4 aa, SARS coronavirus
NGTI

SEQ ID NO: 7269 - protein, 4 aa, SARS coronavirus
NVTI

SEQ ID NO: 7270 - protein, 4 aa, SARS coronavirus
NNTA

SEQ ID NO: 7271 - protein, 4 aa, SARS coronavirus
NVTQ

SEQ ID NO: 7272 - protein, 48 aa, SARS coronavirus; identical to SEQ ID NO: 6694

SEQ ID NO: 7273 - DNA, 147 bp, SARS coronavirus
atggtattgatgtggagatctttgaaaataagacaacacttcctgttaatgttgcatttgagctttgggctaagcgtaacattaaaccagtgccagagattaagatactcaataatttgggtgttgatatcgctgctaatactgtaa

SEQ ID NO: 7274 - protein, 42 aa, SARS coronavirus
MLQGFILLIIRLATLSYLLRMVFILLPQRNQMLSVVGFLVLP

SEQ ID NO: 7275 - DNA, 129 bp, SARS coronavirus
atgttacagggtttcatactattaatcatacgtttggcaaccctgtcataccttttaaggatggtatttattttgctgccacagagaaatcaaatgttgtccgtggttgggtttttggttctaccatga

SEQ ID NO: 7276 - protein, 48 aa, SARS coronavirus
MHLIALSSTYLMPFRLMFQKSQVILNTYESLCLKIKMGFSMFIRAINL

SEQ ID NO: 7277 - DNA, 147 bp, SARS coronavirus
atgcatttaattgcactttcgagtacatatctgatgccttttcgcttgatgtttcagaaaagtcaggtaattttaaacacttacgagagtttgtgtttaaaaataaagatgggtttctctatgtttataagggctatcaacctatag

SEQ ID NO: 7278 - protein, 48 aa, SARS coronavirus
MMKMVQSQMLLIVLKIHLLNSNALLRALRLTKEFTRPLISGLFPQEML

SEQ ID NO: 7279 - DNA, 147 bp, SARS coronavirus
atgatgaaaatggtacaatcacagatgctgttgattgttctcaaaatccacttgctgaactcaaatgctctgttaagagctttgagattgacaaaggaatttaccagacctctaatttcagggttgttccctcaggagatgttgtga

SEQ ID NO: 7280 - protein, 44 aa, SARS coronavirus
MLLNSLLSMHGREKKFLIVLLITLCSTTQHFFQPLSAMAFLPLS

SEQ ID NO: 7281 - DNA, 135 bp, SARS coronavirus
atgctactaaattcccttctgtctatgcatgggagagaaaaaaaatttctaattgtgttgctgattactctgtgctctacaactcaacatttttttcaacctttaagtgctatggcgtttctgccactaagttga

SEQ ID NO: 7282 - protein, 64 aa, SARS coronavirus
MISWVVSLLGILGTLMLLQLVIIIINIGILDMASLGPLRETYLMCLSPLMANLAPHLLLIVIGH

SEQ ID NO: 7283 - DNA, 195 bp, SARS coronavirus
atgatttcatgggttgtgtccttgcttggaatactaggaacattgatgctacttcaactggtaattataattataaatataggtatcttagacatggcaagcttaggccctttgagagagacatatctaatgtgcctttctcccctgatggcaaaccttgcaccccacctgctcttaattgttattggccattaa

SEQ ID NO: 7284 - protein, 48 aa, SARS coronavirus
MLHLKLLFYIKMLTALMFLQQFMQINSHQLGAYILLETMYSRLKQAVL

SEQ ID NO: 7285 - DNA, 147 bp, SARS coronavirus
atgcttcatctgaagttgctgttctatatcaagatgttaactgcactgatgtttctacagcaattcatgcagatcaactcacaccagcttggcgcatatattctactggaaacaatgtattccagactcaagcaggctgtcttatag

SEQ ID NO: 7286 - protein, 52 aa, SARS coronavirus
MALELPKMFSMRTKNKSPTNLTRRLVKFKNHLQQHQLHWASCKTLLTRMLKH

SEQ ID NO: 7287 - DNA, 159 bp, SARS coronavirus
atggcattggagttacccaaaatgttctctatgagaaccaaaaacaaatcgccaaccaatttaacaaggcgattagtcaaattcaagaatcacttacaacaacatcaactgcattgggcaagctgcaagacgttgttaaccagaatgctcaagcattaa

SEQ ID NO: 7288 - protein, 56 aa, SARS coronavirus
MVLSSYMSRMCHPRRGTSPQRQQFVMKAKHTSLVKVFLCLMALLGLLHRGTSFLHK

SEQ ID NO: 7289 - DNA, 171 bp, SARS coronavirus
atggtgttgtcttcctacatgtcacgtatgtgccatcccaggagaggaacttcaccacagcgccagcaatttgtcatgaaggcaaagcatacttccctcgtgaaggtgtttttgtgtttaatggcacttcttggtttattacacagaggaacttcttttctccacaaataa

SEQ ID NO: 7290 - protein, 66 aa, SARS coronavirus
MSLLASLTTQFMILCNLSLTHSKKSWTSTSKIIHHQMLILATFQALTLLSSTFKKKLTASMRSLKI

SEQ ID NO: 7291 - DNA, 201 bp, SARS coronavirus
atgtcgttattggcatcattaacaacacagtttatgatcctctgcaacctgagcttgactcattcaaagaagagctggacaagtacttcaaaaatcatacatcaccagatgttgattttggcgacatttcaggcattaacgcttctgtcgtcaacattcaaaaagaaattgaccgcctcaatgaggtcgctaaaaatttaa

SEQ ID NO: 7292 - DNA, 10 bp, SARS coronavirus
ctaaacgaac

SEQ ID NO: 7293 - DNA, 6 bp, SARS coronavirus
acgaac

SEQ ID NO: 7294 - DNA, 72 bp, SARS coronavirus
ttattaggtttttacctacccaggaaaagccaaccaacctcgatctcttgtagatctgttctctaaacgaac

SEQ ID NO: 7295 - DNA, 60 bp, SARS coronavirus
tacctacccaggaaaagccaaccaacctcgatctcttgtagatctgttctctaaacgaac

SEQ ID NO: 7296 - DNA, 50 bp, SARS coronavirus
ggaaaagccaaccaacctcgatctcttgtagatctgttctctaaacgaac

SEQ ID NO: 7297 - DNA, 40 bp, SARS coronavirus
accaacctcgatctcttgtagatctgttctctaaacgaac

SEQ ID NO: 7298 - DNA, 30 bp, SARS coronavirus
atctcttgtagatctgttctctaaacgaac

SEQ ID NO: 7299 - DNA, 20 bp, SARS coronavirus
gatctgttctctaaacgaac

SEQ ID NO: 7300 - DNA, 15 bp, SARS coronavirus
gttctctaaacgaac

SEQ ID NO: 7301 - DNA, 13 bp, SARS coronavirus
tctctaaacgaac

SEQ ID NO: 7302 - protein, 680 aa, Fusion polypeptide (SARS coronavirus & Neisseria meningitidis)
MKHFPSKVLTTAILATFCSGALAATNDDDSDLDRCTTFDDVQAPNYTQHTSSMRGVYYPDEIFRSDTLYLTQDLFLPFYSNVTGFHTINHTFGNPVIPFKDGIYFAATEKSNVVRGWVFGSTMNNKSQSVIIINNSTNVVIRACNFELCDNPFFAVSKPMGTQTHTMIFDNAFNCTFEYISDAFSLDVSEKSGNFKHLREFVFKNKDGFLYVYKGYQPIDVVRDLPSGFNTLKPIFKLPLGINITNFRAILTAFSPAQDIWGTSAAAYFVGYLKPTTFMLKYDENGTITDAVDCSQNPLAELKCSVKSFEIDKGIYQTSNFRVVPSGDVVRFPNITNLCPFGEVFNATKFPSVYAWERKKISNCVADYSVLYNSTFFSTFKCYGVSATKLNDLCFSNVYADSFVVKGDDVRQIAPGQTGVIADYNYKLPDDFMGCVLAWNTRNIDATSTGNYNYKYRYLRHGKLRPFERDISNVPFSPDGKPCTPPALNCYWPLNDYGFYTTTGIGYQPYRVVVLSFELLNAPATVCGPKLSTDLIKNQCVNFNFNGLTGTGVLTPSSKRFQPFQQFGRDVSDFTDSVRDPKTSEILDISPCSFGGVSVITPGTNASSEVAVLYQDVNCTDVSTAIHADQLTPAWRIYSTGNNVFQTQAGCLIGAEHVDTSYECDIPIGAGICASYHTGS

SEQ ID NO: 7303 - protein, 998 aa, Fusion polypeptide (SARS coronavirus & Neisseria meningitidis)
MKHFPSKVLTTAILATFCSGALAATNDDDSDLDRCTTFDDVQAPNYTQHTSSMRGVYYPDEIFRSDTLYLTQDLFLPFYSNVTGFHTINHTFGNPVIPFKDGIYFAATEKSNVVRGWVFGSTMNNKSQSVIIINNSTNVVIRACNFELCDNPFFAVSKPMGTQTHTMIFDNAFNCTFEYISDAFSLDVSEKSGNFKHLREFVFKNKDGFLYVYKGYQPIDVVRDLPSGFNTLKPIFKLPLGINITNFRAILTAFSPAQDIWGTSAAAYFVGYLKPTTFMLKYDENGTITDAVDCSQNPLAELKCSVKSFEIDKGIYQTSNFRVVPSGDVVRFPNITNLCPFGEVFNATKFPSVYAWERKKISNCVADYSVLYNSTFFSTFKCYGVSATKLNDLCFSNVYADSFVVKGDDVRQIAPGQTGVIADYNYKLPDDFMGCVLAWNTRNIDATSTGNYNYKYRYLRHGKLRPFERDISNVPFSPDGKPCTPPALNCYWPLNDYGFYTTTGIGYQPYRVVVLSFELLNAPATVCGPKLSTDLIKNQCVNFNFNGLTGTGVLTPSSKRFQPFQQFGRDVSDFTDSVRDPKTSEILDISPCSFGGVSVITPGTNASSEVAVLYQDVNCTDVSTAIHADQLTPAWRIYSTGNNVFQTQAGCLIGAEHVDTSYECDIPIGAGICASYHTGSKVVTNLTKTVNENKQNVDAKVKAAESEIEKLTTKLADTDAALADTDAALDATTNALNKLGENITTFAEETKTNIVKIDEKLEAVADTVDKHAEAFNDIADSLDETNTKADEAVKTANEAKQTAEETKQNVDAKVKAAETAAGKAEAAAGTANTAADKAEAVAAKVTDIKADIATNKDNIAKKANSADVYTREESDSKFVRIDGLNATTEKLDTRLASAEKSIADHDTRLNGLDKTVSDLRKETRQGLAEQAALSGLFQPYNVGRFNVTAAVGGYKSESAVAIGTGFRFTENFAAKAGVAVGTSSGSSAAYHVGVNYEW

SEQ ID NO: 7304 - protein, 943 aa, Fusion polypeptide (SARS coronavirus & Neisseria meningitidis)
MKHFPSKVLTTAILATFCSGALAATNDDDSDLDRCTTFDDVQAPNYTQHTSSMRGVYYPDEIFRSDTLYLTQDLFLPFYSNVTGFHTINHTFGNPVIPFKDGIYFAATEKSNVVRGWVFGSTMNNKSQSVIIINNSTNVVIRACNFELCDNPFFAVSKPMGTQTHTMIFDNAFNCTFEYISDAFSLDVSEKSGNFKHLREFVFKNKDGFLYVYKGYQPIDVVRDLPSGFNTLKPIFKLPLGINITNFRAILTAFSPAQDIWGTSAAAYFVGYLKPTTFMLKYDENGTITDAVDCSQNPLAELKCSVKSFEIDKGIYQTSNFRVVPSGDVVRFPNITNLCPFGEVFNATKFPSVYAWERKKISNCVADYSVLYNSTFFSTFKCYGVSATKLNDLCFSNVYADSFVVKGDDVRQIAPGQTGVIADYNYKLPDDFMGCVLAWNTRNIDATSTGNYNYKYRYLRHGKLRPFERDISNVPFSPDGKPCTPPALNCYWPLNDYGFYTTTGIGYQPYRVVVLSFELLNAPATVCGPKLSTDLIKNQCVNFNFNGLTGTGVLTPSSKRFQPFQQFGRDVSDFTDSVRDPKTSEILDISPCSFGGVSVITPGTNASSEVAVLYQDVNCTDVSTAIHADQLTPAWRIYSTGNNVFQTQAGCLIGAEHVDTSYECDIPIGAGICASYHTGSKVVTNLTKTVNENKQNVDAKVKAAESEIEKLTTKLADTDAALADTDAALDATTNALNKLGENITTFAEETKTNIVKIDEKLEAVADTVDKHAEAFNDIADSLDETNTKADEAVKTANEAKQTAEETKQNVDAKVKAAETAAGKAEAAAGTANTAADKAEAVAAKVTDIKADIATNKDNIAKKANSADVYTREESDSKFVRIDGLNATTEKLDTRLASAEKSIADHDTRLNGLDKTVSDLRKETRQGLAEQAALSGLFQPYNVG

SEQ ID NO: 7305 - protein, 1270 aa, Fusion polypeptide (SARS coronavirus & Neisseria meningitidis)
MKHFPSKVLTTAILATFCSGALAATNDDDSDLDRCTTFDDVQAPNYTQHTSSMRGVYYPDEIFRSDTLYLTQDLFLPFYSNVTGFHTINHTFGNPVIPFKDGIYFAATEKSNVVRGWVFGSTMNNKSQSVIIINNSTNVVIRACNFELCDNPFFAVSKPMGTQTHTMIFDNAFNCTFEYISDAFSLDVSEKSGNFKHLREFVFKNKDGFLYVYKGYQPIDVVRDLPSGFNTLKPIFKLPLGINITNFRAILTAFSPAQDIWGTSAAAYFVGYLKPTTFMLKYDENGTITDAVDCSQNPLAELKCSVKSFEIDKGIYQTSNFRVVPSGDVVRFPNITNLCPFGEVFNATKFPSVYAWERKKISNCVADYSVLYNSTFFSTFKCYGVSATKLNDLCFSNVYADSFVVKGDDVRQIAPGQTGVIADYNYKLPDDFMGCVLAWNTRNIDATSTGNYNYKYRYLRHGKLRPFERDISNVPFSPDGKPCTPPALNCYWPLNDYGFYTTTGIGYQPYRVVVLSFELLNAPATVCGPKLSTDLIKNQCVNFNFNGLTGTGVLTPSSKRFQPFQQFGRDVSDFTDSVRDPKTSEILDISPCSFGGVSVITPGTNASSEVAVLYQDVNCTDVSTAIHADQLTPAWRIYSTGNNVFQTQAGCLIGAEHVDTSYECDIPIGAGICASYHTGSVSLLRSTSQKSIVAYTMSLGADSSIAYSNNTIAIPTNFSISITTEVMPVSMAKTSVDCNMYICGDSTECANLLLQYGSFCTQLNRALSGIAAEQDRNTREVFAQVKQMYKTPTLKYFGGFNFSQILPDPLKPTKRSFIEDLLFNKVTLADAGFMKQYGECLGDINARDLICAQKFNGLTVLPPLLTDDMIAAYTAALVSGTATAGWTFGAGAALQIPFAMQMAYRFNGIGVTQNVLYENQKQIANQFNKAISQIQESLTTTSTALGKLQDVVNQNAQALNTLVKQLSSNFGAISSVLNDILSRLDKVEAEVQIDRLITGRLQSLQTYVTQQLIRAAEIRASANLAATKMSECVLGQSKRVDFCGKGYHLMSFPQAAPHGVVFLHVTYVPSQERNFTTAPAICHEGKAYFPREGVFVFNGTSWFITQRNFFSPQIITTDNTFVSGNCDVVIGIINNTVYDPLQPELDSFKEELDKYFKNHTSPDVDFGDISGINASVVNIQKEIDRLNEVAKNLNESLIDLQELGKYEQYIKWPKLRFNVTAAVGGYKSESAVAIGTGFRFTENFAAKAGVAVGTSSGSSAAYHVGVNYEW

SEQ ID NO: 7306 - protein, 1213 aa, Fusion polypeptide (SARS coronavirus & Neisseria meningitidis)
MKHFPSKVLTTAILATFCSGALAATNDDDSDLDRCTTFDDVQAPNYTQHTSSMRGVYYPDEIFRSDTLYLTQDLFLPFYSNVTGFHTINHTFGNPVIPFKDGIYFAATEKSNVVRGWVFGSTMNNKSQSVIIINNSTNVVIRACNFELCDNPFFAVSKPMGTQTHTMIFDNAFNCTFEYISDAFSLDVSEKSGNFKHLREFVFKNKDGFLYVYKGYQPIDVVRDLPSGFNTLKPIFKLPLGINITNFRAILTAFSPAQDIWGTSAAAYFVGYLKPTTFMLKYDENGTITDAVDCSQNPLAELKCSVKSFEIDKGIYQTSNFRVVPSGDVVRFPNITNLCPFGEVFNATKFPSVYAWERKKISNCVADYSVLYNSTFFSTFKCYGVSATKLNDLCFSNVYADSFVVKGDDVRQIAPGQTGVIADYNYKLPDDFMGCVLAWNTRNIDATSTGNYNYKYRYLRHGKLRPFERDISNVPFSPDGKPCTPPALNCYWPLNDYGFYTTTGIGYQPYRVVVLSFELLNAPATVCGPKLSTDLIKNQCVNFNFNGLTGTGVLTPSSKRFQPFQQFGRDVSDFTDSVRDPKTSEILDISPCSFGGVSVITPGTNASSEVAVLYQDVNCTDVSTAIHADQLTPAWRIYSTGNNVFQTQAGCLIGAEHVDTSYECDIPIGAGICASYHTGSVSLLRSTSQKSIVAYTMSLGADSSIAYSNNTIAIPTNFSISITTEVMPVSMAKTSVDCNMYICGDSTECANLLLQYGSFCTQLNRALSGIAAEQDRNTREVFAQVKQMYKTPTLKYFGGFNFSQILPDPLKPTKRSFIEDLLFNKVTLADAGFMKQYGECLGDINARDLICAQKFNGLTVLPPLLTDDMIAAYTAALVSGTATAGWTFGAGAALQIPFAMQMAYRFNGIGVTQNVLYENQKQIANQFNKAISQIQESLTTTSTALGKLQDVVNQNAQALNTLVKQLSSNFGAISSVLNDILSRLDKVEAEVQIDRLITGRLQSLQTYVTQQLIRAAEIRASANLAATKMSECVLGQSKRVDFCGKGYHLMSFPQAAPHGVVFLHVTYVPSQERNFTTAPAICHEGKAYFPREGVFVFNGTSWFITQRNFFSPQIITTDNTFVSGNCDVVIGIINNTVYDPLQPELDSFKEELDKYFKNHTSPDVDFGDISGINASVVNIQKEIDRLNEVAKNLNESLIDLQELGKYEQYIKWP

SEQ ID NO: 7307 - protein, 649 aa, SARS coronavirus
SDLDRCTTFDDVQAPNYTQHTSSMRGVYYPDEIFRSDTLYLTQDLFLPFYSNVTGFHTINHTFGNPVIPFKDGIYFAATEKSNVVRGWVFGSTMNNKSQSVIIINNSTNVVIRACNFELCDNPFFAVSKPMGTQTHTMIFDNAFNCTFEYISDAFSLDVSEKSGNFKHLREFVFKNKDGFLYVYKGYQPIDVVRDLPSGFNTLKPIFKLPLGINITNFRAILTAFSPAQDIWGTSAAAYFVGYLKPTTFMLKYDENGTITDAVDCSQNPLAELKCSVKSFEIDKGIYQTSNFRVVPSGDVVRFPNITNLCPFGEVFNATKFPSVYAWERKKISNCVADYSVLYNSTFFSTFKCYGVSATKLNDLCFSNVYADSFVVKGDDVRQIAPGQTGVIADYNYKLPDDFMGCVLAWNTRNIDATSTGNYNYKYRYLRHGKLRPFERDISNVPFSPDGKPCTPPALNCYWPLNDYGFYTTTGIGYQPYRVVVLSFELLNAPATVCGPKLSTDLIKNQCVNFNFNGLTGTGVLTPSSKRFQPFQQFGRDVSDFTDSVRDPKTSEILDISPCAFGGVSVITPGTNASSEVAVLYQDVNCTDVSTAIHADQLTPAWRIYSTGNNVFQTQAGCLIGAEHVDTSYECDIPIGAGICASYHT

SEQ ID NO: 7308 - protein, 533 aa, SARS coronavirus
VSLLRSTSQKSIVAYTMSLGADSSIAYSNNTIAIPTNFSISITTEVMPVSMAKTSVDCNMYICGDSTECANLLLQYGSFCTQLNRALSGIAAEQDRNTREVFAQVKQMYKTPTLKYFGGFNFSQILPDPLKPTKRSFIEDLLFNKVTLADAGFMKQYGECLGDINARDLICAQKFNGLTVLPPLLTDDMIAAYTAALVSGTATAGWTFGAGAALQIPFAMQMAYRFNGIGVTQNVLYENQKQIANQFNKAISQIQESLTTTSTALGKLQDVVNQNAQALNTLVKQLSSNFGAISSVLNDILSRLDKVEAEVQIDRLITGRLQSLQTYVTQQLIRAAEIRASANLAATKMSECVLGQSKRVDFCGKGYHLMSFPQAAPHGVVFLHVTYVPSQERNFTTAPAICHEGKAYFPREGVFVFNGTSWFITQRNFFSPQIITTDNTFVSGNCDVVIGIINNTVYDPLQPELDSFKEELDKYFKNHTSPDVDLGDISGINASVVNIQKEIDRLNEVAKNLNESLIDLQELGKYEQYIKWP

SEQ ID NO: 7309 - protein, 364 aa, Neisseria meningitidis
MSMKHFPSKVLTTAILATFCSGALAATSDDDVKKAATVAIVAAYNNGQEINGFKAGETIYDIGEDGTITQKDATAADVEADDFKGLGLKKVVTNLTKTVNENKQNVDAKVKAAESEIEKLTTKLADTDAALADTDAALDETTNALNKLGENITTFAEETKTNIVKIDEKLEAVADTVDKHAEAFNDIADSLDETNTKADEAVKTANEAKQTAEETKQNVDAKVKAAETAAGKAEAAAGTANTAADKAEAVAAKVTDIKADIATNKADIAKNSARIDSLDKNVANLRKETRQGLAEQAALSGLFQPYNVGRFNVTAAVGGYKSESAVAIGTGFRFTENFAAKAGVAVGTSSGSSAAYHVGVNYEW

SEQ ID NO: 7310 - protein, 29 aa, Neisseria meningitidis
MSMKHFPSKVLTTAILATFCSGALAATSD

SEQ ID NO: 7311 - protein, 23 aa, Neisseria meningitidis
MKHFPSKVLTTAILATFCSGALA

SEQ ID NO: 7312 - protein, 6 aa, Neisseria meningitidis
ATNDDD

SEQ ID NO: 7313 - protein, 274 aa, Neisseria meningitidis
VVTNLTKTVNENKQNVDAKVKAAESEIEKLTTKLADTDAALADTDAALDETTNALNKLGENITTFAEETKTNIVKIDEKLEAVADTVDKHAEAFNDIADSLDETNTKADEAVKTANEAKQTAEETKQNVDAKVKAAETAAGKAEAAAGTANTAADKAEAVAAKVTDIKADIATNKADIAKNSARIDSLDKNVANLRKETRQGLAEQAALSGLFQPYNVGRFNVTAAVGGYKSESAVAIGTGFRFTENFAAKAGVAVGTSSGSSAAYHVGVNYEW

SEQ ID NO: 7314 - protein, 200 aa, Neisseria meningitidis
VVTNLTKTVNENKQNVDAKVKAAESEIEKLTTKLADTDAALADTDAALDETTNALNKLGENITTFAEETKTNIVKIDEKLEAVADTVDKHAEAFNDIADSLDETNTKADEAVKTANEAKQTAEETKQNVDAKVKAAETAAGKAEAAAGTANTAADKAEAVAAKVTDIKADIATNKADIAKNSARIDSLDKNVANLRKETR

SEQ ID NO: 7315 - protein, 74 aa, Neisseria meningitidis
QGLAEQAALSGLFQPYNVGRFNVTAAVGGYKSESAVAIGTGFRFTENFAAKAGVAVGTSSGSSAAYHVGVNYEW

SEQ ID NO: 7316 - DNA, 118 bp, Primer
gggaattccatatgaaacactttccatccaaagtactgaccacagccatccttgccactttctgtagcggcgcactggcagccacaaacgacgacgatagtgaccttgaccggtgcac

SEQ ID NO: 7317 - DNA, 31 bp, Primer
cgcggatcctgtatggtaactagcacaaatg

SEQ ID NO: 7318 - DNA, 30 bp, Primer
cgcggatccttattacgtagtactagccaa

SEQ ID NO: 7319 - DNA, 31 bp, Primer
gcccaagcttaggccatttaatatattgctc

SEQ ID NO: 7320 - DNA, 34 bp, Primer
cccgctcgagttaaggccatttaatatattgctc

SEQ ID NO: 7321 - DNA, 30 bp, Primer
cgcggatccaaagtcgtgactaacctgacc

SEQ ID NO: 7322 - DNA, 34 bp, Primer
cccgctcgagttaacccacgttgtaaggttggaa

SEQ ID NO: 7323 - DNA, 29 bp, Primer
gcccaagcttcggttcaatgtaacggctg

SEQ ID NO: 7324 - DNA, 34 bp, Primer
cccgctcgagttaccactcgtaattgacgccgac

SEQ ID NO: 7325 - DNA, 24 bp, Primer
ctcataaacaaatccataagttcg

SEQ ID NO: 7326 - DNA, 50 bp, Primer
atatatatatcctcagcccaccatgtttattttcttattatttcttactc

SEQ ID NO: 7327 - DNA, 41 bp, Primer
atatatatgcggccgcttatgtgtaatgtaatttgacaccc

SEQ ID NO: 7328 - DNA, 49 bp, Primer
atatatatatctcgagccaccatgtttattttcttattatttcttactc

SEQ ID NO: 7329 - DNA, 49 bp, Primer
atatatatatgaattcccaccatgtttattttcttattatttcttactc

SEQ ID NO: 7330 - DNA, 39 bp, Primer
atatatattctagattatgtgtaatgtaatttgacaccc

SEQ ID NO: 7331 - DNA, 5 bp, Artificial Sequence
  Kozak consensus sequence
ccacc

SEQ ID NO: 7332 - DNA, 21 bp, Artificial Sequence
  Primer
gagccaccacattttcatcga

SEQ ID NO: 7333 - DNA, 23 bp, Artificial Sequence
  Primer
gacttgaaagagccaccacattt

SEQ ID NO: 7334 - DNA, 24 bp, Artificial Sequence
  Primer
gacttgaaagagccaccacatttt

SEQ ID NO: 7335 - DNA, 22 bp, Artificial Sequence
  Primer
ggacttgaaagagccaccacat

SEQ ID NO: 7336 - DNA, 23 bp, Artificial Sequence
  Primer
aggacttgaaagagccaccacat

SEQ ID NO: 7337 - DNA, 24 bp, Artificial Sequence
  Primer
gcagctctccctagcattattcac

SEQ ID NO: 7338 - DNA, 23 bp, Artificial Sequence
  Primer
ggcagctctccctagcattattc

SEQ ID NO: 7339 - DNA, 23 bp, Artificial Sequence
  Primer
aggcagctctccctagcattatt

SEQ ID NO: 7340 - DNA, 27 bp, Artificial Sequence
  Primer
agctctccctagcattattcactgtac

SEQ ID NO: 7341 - DNA, 23 bp, Artificial Sequence
  Primer
gcagctctccctagcattattca

SEQ ID NO: 7342 - DNA, 24 bp, Artificial Sequence
  Probe
ccacgcggagtacgatcgagggta

SEQ ID NO: 7343 - DNA, 22 bp, Artificial Sequence
  Probe
cgaggccacgcggagtacgatc

SEQ ID NO: 7344 - DNA, 22 bp, Artificial Sequence
  Probe
tcgaggccacgcggagtacgat

SEQ ID NO: 7345 - DNA, 24 bp, Artificial Sequence
  Probe
atcgaggccacgcggagtacgatc

SEQ ID NO: 7346 - DNA, 23 bp, Artificial Sequence
  Probe
aggccacgcggagtacgatcgag

SEQ ID NO: 7347 - DNA, 23 bp, Artificial Sequence
  Probe
atcgaggccacgcggagtacgat

SEQ ID NO: 7348 - DNA, 22 bp, Artificial Sequence
  Probe
aggccacgcggagtacgatcga

SEQ ID NO: 7349 - DNA, 22 bp, Artificial Sequence
  Probe
catcgaggccacgcggagtacg

SEQ ID NO: 7350 - DNA, 22 bp, Artificial Sequence
  Probe
atcgaggccacgcggagtacga

SEQ ID NO: 7351 - DNA, 21 bp, Artificial Sequence
  Probe
tcgaggccacgcggagtacga

SEQ ID NO: 7352 - DNA, 23 bp, Artificial Sequence
  Probe
ttcatcgaggccacgcggagtac

SEQ ID NO: 7353 - DNA, 18 bp, Artificial Sequence
  Primer
cccaggaaaagccaacca

SEQ ID NO: 7354 - DNA, 19 bp, Artificial Sequence
  Primer
acccaggaaaagccaacca

SEQ ID NO: 7355 - DNA, 20 bp, Artificial Sequence
  Primer
tacccaggaaaagccaacca

SEQ ID NO: 7356 - DNA, 21 bp, Artificial Sequence
  Primer
ctacccaggaaaagccaacca

SEQ ID NO: 7357 - DNA, 29 bp, Artificial Sequence
  Primer
tctgttctctaaacgaactttaaaatctg

SEQ ID NO: 7358 - DNA, 30 bp, Artificial Sequence
  Primer
atctgttctctaaacgaactttaaaatctg

SEQ ID NO: 7359 - DNA, 31 bp, Artificial Sequence
  Primer
gatctgttctctaaacgaactttaaaatctg

SEQ ID NO: 7360 - DNA, 32 bp, Artificial Sequence
  Primer
gtagatctgttctctaaacgaactttaaaatc

SEQ ID NO: 7361 - DNA, 30 bp, Artificial Sequence
  Primer
tcttgtagatctgttctctaaacgaacttt

SEQ ID NO: 7362 - DNA, 33 bp, Artificial Sequence
  Primer
gtagatctgttctctaaacgaactttaaaatct

SEQ ID NO: 7363 - DNA, 22 bp, Artificial Sequence
  Primer
cgagcgacagctacacagattt

SEQ ID NO: 7364 - DNA, 20 bp, Artificial Sequence
  Primer
ccgagcgacagctacacaga

SEQ ID NO: 7365 - DNA, 19 bp, Artificial Sequence
  Primer
gccgagcgacagctacaca

SEQ ID NO: 7366 - DNA, 19 bp, Artificial Sequence
  Primer
cagccgagcgacagctaca

SEQ ID NO: 7367 - DNA, 28 bp, Artificial Sequence
  Primer
ttattgtttatactgcgtaggtgcacta

SEQ ID NO: 7368 - DNA, 18 bp, Artificial Sequence
  Primer
gcagccgagcgacagcta

SEQ ID NO: 7369 - DNA, 29 bp, Artificial Sequence
  Primer
attattgtttatactgcgtaggtgcacta

SEQ ID NO: 7370 - DNA, 30 bp, Artificial Sequence
  Primer
tattattgtttatactgcgtaggtgcacta

SEQ ID NO: 7371 - DNA, 27 bp, Artificial Sequence
  Primer
attgtttatactgcgtaggtgcactag

SEQ ID NO: 7372 - DNA, 31 bp, Artificial Sequence
  Primer
ttattattgtttatactgcgtaggtgcacta

SEQ ID NO: 7373 - DNA, 28 bp, Artificial Sequence
  Primer
tattgtttatactgcgtaggtgcactag

SEQ ID NO: 7374 - DNA, 38 bp, Artificial Sequence
  Probe
cctcgatctcttgtagatctgttctctaaacgaacttt

SEQ ID NO: 7375 - DNA, 21 bp, Artificial Sequence
  Probe
agctgtcgctcggctgcatgc

SEQ ID NO: 7376 - DNA, 22 bp, Artificial Sequence
  Probe
tagctgtcgctcggctgcatgc

SEQ ID NO: 7377 - DNA, 23 bp, Artificial Sequence
  Probe
tgtagctgtcgctcggctgcatg

SEQ ID NO: 7378 - DNA, 23 bp, Artificial Sequence
  Probe
tgtgtagctgtcgctcggctgca

SEQ ID NO: 7379 - DNA, 24 bp, Artificial Sequence
  Probe
ctgtgtagctgtcgctcggctgca

SEQ ID NO: 7380 - DNA, 24 bp, Artificial Sequence
  Probe
tctgtgtagctgtcgctcggctgc

SEQ ID NO: 7381 - DNA, 25 bp, Artificial Sequence
  Probe
atctgtgtagctgtcgctcggctgc

SEQ ID NO: 7382 - DNA, 27 bp, Artificial Sequence
  Probe
aaatctgtgtagctgtcgctcggctgc

SEQ ID NO: 7383 - DNA, 26 bp, Artificial Sequence
  Probe
aatctgtgtagctgtcgctcggctgc

SEQ ID NO: 7384 - DNA, 25 bp, Artificial Sequence
  Probe
ctgtgtagctgtcgctcggctgcat

SEQ ID NO: 7385 - DNA, 24 bp, Artificial Sequence
  Probe
tgtgtagctgtcgctcggctgcat

SEQ ID NO: 7386 - DNA, 8 bp, SARS coronavirus
ggaagagc

SEQ ID NO: 7387 - DNA, 6 bp, SARS coronavirus
gttcgt

SEQ ID NO: 7388 - DNA, 9 bp, SARS coronavirus
taaacgaac

SEQ ID NO: 7389 - DNA, 20 bp, Artificial Sequence
  Poly-T
tttttttttttttttttttt

SEQ ID NO: 7390 - DNA, 28 bp, SARS coronavirus
cggtgtaagtgcagcccgtcttacaccg

SEQ ID NO: 7391 - protein, 6 aa, Artificial Sequence
  Poly-glycine linker
GGGGGG

SEQ ID NO: 7392 - protein, 6 aa, Artificial Sequence
  Poly-glycine linker
GGGGSG

SEQ ID NO: 7393 - protein, 6 aa, Artificial Sequence
  Hexa-histidine tag
HHHHHH

SEQ ID NO: 7394 - protein, 37 aa, SARS coronavirus
KDKKKKTDEAQPLPQRQKKQPTVTLLPAADMDDFSRQ

SEQ ID NO: 7395 - DNA, 28 bp, Artificial Sequence
  Primer
gtaggttagtacccacagcatctctagt

SEQ ID NO: 7396 - DNA, 27 bp, Artificial Sequence
  Probe
acagcatctctagttgcatgacagccc

SEQ ID NO: 7397 - DNA, 26 bp, Artificial Sequence
  Probe
ctacatcaaagccaatccacgcacga

SEQ ID NO: 7398 - protein, 16 aa, SARS coronavirus
DVQAPNYTQHTSSMRG

SEQ ID NO: 7399 - protein, 15 aa, SARS coronavirus
PSSKRFQPFQQFGRD

SEQ ID NO: 7400 - protein, 9 aa, SARS coronavirus
EIEPKLDGY

SEQ ID NO: 7401 - protein, 9 aa, SARS coronavirus
CTDDNALAY

SEQ ID NO: 7402 - protein, 9 aa, SARS coronavirus
VAEMDGIQY

SEQ ID NO: 7403 - protein, 9 aa, SARS coronavirus
AVDPAKAYK

SEQ ID NO: 7404 - protein, 9 aa, SARS coronavirus
TCDGNTFTY

SEQ ID NO: 7405 - protein, 9 aa, SARS coronavirus
VVENPTIQK

SEQ ID NO: 7406 - protein, 9 aa, SARS coronavirus
GTDLEGKFY

SEQ ID NO: 7407 - protein, 9 aa, SARS coronavirus
RIDGAHLTK

SEQ ID NO: 7408 - protein, 9 aa, SARS coronavirus
STDDCFANK

SEQ ID NO: 7409 - protein, 9 aa, SARS coronavirus
YIESKRGVY

SEQ ID NO: 7410 - protein, 9 aa, SARS coronavirus
CVEYYPLLF

SEQ ID NO: 7411 - protein, 9 aa, SARS coronavirus
YTELEPPCR

SEQ ID NO: 7412 - protein, 9 aa, SARS coronavirus
KSDGTGTIY

SEQ ID NO: 7413 - protein, 9 aa, SARS coronavirus
NGDVVAIDY

SEQ ID NO: 7414 - protein, 9 aa, SARS coronavirus
LSEAREHLK

SEQ ID NO: 7415 - protein, 9 aa, SARS coronavirus
FADINGKLY

SEQ ID NO: 7416 - protein, 9 aa, SARS coronavirus
TLDESFLGR

SEQ ID NO: 7417 - protein, 9 aa, SARS coronavirus
LADTSLSGY

SEQ ID NO: 7418 - protein, 9 aa, SARS coronavirus
VTDTPKGPK

SEQ ID NO: 7419 - protein, 9 aa, SARS coronavirus
GPEHSVADY

SEQ ID NO: 7420 - protein, 10 aa, SARS coronavirus
EIEPKLDGYY

SEQ ID NO: 7421 - protein, 10 aa, SARS coronavirus
RTELGVEFLK

SEQ ID NO: 7422 - protein, 10 aa, SARS coronavirus
ASEFSSLPSY

SEQ ID NO: 7423 - protein, 10 aa, SARS coronavirus
FIDTIKSLDY

SEQ ID NO: 7424 - protein, 10 aa, SARS coronavirus
CTDDNALAYY

SEQ ID NO: 7425 - protein, 10 aa, SARS coronavirus
QLEQPYVFIK

SEQ ID NO: 7426 - protein, 10 aa, SARS coronavirus
KTEEKSVVQK

SEQ ID NO: 7427 - protein, 10 aa, SARS coronavirus
TTEMLSRALK

SEQ ID NO: 7428 - protein, 10 aa, SARS coronavirus
TAEDMLNPNY

SEQ ID NO: 7429 - protein, 10 aa, SARS coronavirus
YSELRPDTRY

SEQ ID NO: 7430 - protein, 10 aa, SARS coronavirus
VIEGPTTCGY

SEQ ID NO: 7431 - protein, 10 aa, SARS coronavirus
LLEIKDKEQY

SEQ ID NO: 7432 - protein, 10 aa, SARS coronavirus
NTEDSKTEEK

SEQ ID NO: 7433 - protein, 10 aa, SARS coronavirus
ELEPPCRFVT

SEQ ID NO: 7434 - protein, 10 aa, SARS coronavirus
TLEEAKTALK

SEQ ID NO: 7435 - protein, 10 aa, SARS coronavirus
DSEVVLKKLK

SEQ ID NO: 7436 - protein, 10 aa, SARS coronavirus
GTDPIEDYEQ

SEQ ID NO: 7437 - protein, 10 aa, SARS coronavirus
EIDETCEHEY

SEQ ID NO: 7438 - protein, 10 aa, SARS coronavirus
IVDYGVRFFF

SEQ ID NO: 7439 - protein, 10 aa, SARS coronavirus
TLDESFLGRY

SEQ ID NO: 7440 - protein, 9 aa, SARS coronavirus
KLTDNVAIK

SEQ ID NO: 7441 - protein, 9 aa, SARS coronavirus
ALCTFLLNK

SEQ ID NO: 7442 - protein, 9 aa, SARS coronavirus
LLFADINGK

SEQ ID NO: 7443 - protein, 9 aa, SARS coronavirus
GMKRSFYVY

SEQ ID NO: 7444 - protein, 9 aa, SARS coronavirus
SLVLGVNEK

SEQ ID NO: 7445 - protein, 9 aa, SARS coronavirus
VLAYMLFTK

SEQ ID NO: 7446 - protein, 9 aa, SARS coronavirus
RMYIFFASF

SEQ ID NO: 7447 - protein, 9 aa, SARS coronavirus
LLNKEMYLK

SEQ ID NO: 7448 - protein, 9 aa, SARS coronavirus
GLFCLLNRY

SEQ ID NO: 7449 - protein, 9 aa, SARS coronavirus
TMLFTMLRK

SEQ ID NO: 7450 - protein, 9 aa, SARS coronavirus
GVYSVFYLY

SEQ ID NO: 7451 - protein, 9 aa, SARS coronavirus
KLMVVVPDY

SEQ ID NO: 7452 - protein, 9 aa, SARS coronavirus
LLSGHNLAK

SEQ ID NO: 7453 - protein, 9 aa, SARS coronavirus
GLWLDDTVY

SEQ ID NO: 7454 - protein, 9 aa, SARS coronavirus
ALAYYNNSK

SEQ ID NO: 7455 - protein, 9 aa, SARS coronavirus
NLLGTTVEK

SEQ ID NO: 7456 - protein, 9 aa, SARS coronavirus
LLMPLKAPK

SEQ ID NO: 7457 - protein, 9 aa, SARS coronavirus
SLREVKTIK

SEQ ID NO: 7458 - protein, 9 aa, SARS coronavirus
NMHLSTLMK

SEQ ID NO: 7459 - protein, 9 aa, SARS coronavirus
VMYMGTLSY

SEQ ID NO: 7460 - protein, 10 aa, SARS coronavirus
QLEQPYVFIK

SEQ ID NO: 7461 - protein, 10 aa, SARS coronavirus
LLFQLCTFTK

SEQ ID NO: 7462 - protein, 10 aa, SARS coronavirus
KLSAGVEFLK

SEQ ID NO: 7463 - protein, 10 aa, SARS coronavirus
ALYEQVVMDY

SEQ ID NO: 7464 - protein, 10 aa, SARS coronavirus
KMFDAYVDTF

SEQ ID NO: 7465 - protein, 10 aa, SARS coronavirus
GLAAEWVLAY

SEQ ID NO: 7466 - protein, 10 aa, SARS coronavirus
FLLNKEMYLK

SEQ ID NO: 7467 - protein, 10 aa, SARS coronavirus
FLKDAWEILK

SEQ ID NO: 7468 - protein, 10 aa, SARS coronavirus
CLDAGINYVK

SEQ ID NO: 7469 - protein, 10 aa, SARS coronavirus
QLHNDILLAK

SEQ ID NO: 7470 - protein, 10 aa, SARS coronavirus
MLFTKFFYLL

SEQ ID NO: 7471 - protein, 10 aa, SARS coronavirus
GLMLLEIKDK

SEQ ID NO: 7472 - protein, 10 aa, SARS coronavirus
VLTSEEVVLK

SEQ ID NO: 7473 - protein, 10 aa, SARS coronavirus
CLLSGHNLAK

SEQ ID NO: 7474 - protein, 10 aa, SARS coronavirus
RMYIFFASFY

SEQ ID NO: 7475 - protein, 10 aa, SARS coronavirus
KLKKSLNVAK

SEQ ID NO: 7476 - protein, 10 aa, SARS coronavirus
GLYRQCIRGK

SEQ ID NO: 7477 - protein, 10 aa, SARS coronavirus
LLSGHNLAKK

SEQ ID NO: 7478 - protein, 10 aa, SARS coronavirus
NLKPRVEAPK

SEQ ID NO: 7479 - protein, 10 aa, SARS coronavirus
LLLFADINGK

SEQ ID NO: 7480 - protein, 9 aa, SARS coronavirus
RYMNSQGLL

SEQ ID NO: 7481 - protein, 9 aa, SARS coronavirus
KYLYFIKGL

SEQ ID NO: 7482 - protein, 9 aa, SARS coronavirus
KYKYFSGAL

SEQ ID NO: 7483 - protein, 9 aa, SARS coronavirus
TYTEIEPKL

SEQ ID NO: 7484 - protein, 9 aa, SARS coronavirus
DYIKLNGPL

SEQ ID NO: 7485 - protein, 9 aa, SARS coronavirus
NYMPYVFTL

SEQ ID NO: 7486 - protein, 9 aa, SARS coronavirus
DYMSLSEQL

SEQ ID NO: 7487 - protein, 9 aa, SARS coronavirus
GYVTHGFNL

SEQ ID NO: 7488 - protein, 9 aa, SARS coronavirus
LYHDSQNML

SEQ ID NO: 7489 - protein, 9 aa, SARS coronavirus
CYFGLFCLL

SEQ ID NO: 7490 - protein, 9 aa, SARS coronavirus
QYCALSPGL

SEQ ID NO: 7491 - protein, 9 aa, SARS coronavirus
YYTEQPIDL

SEQ ID NO: 7492 - protein, 9 aa, SARS coronavirus
SYSGQRTEL

SEQ ID NO: 7493 - protein, 9 aa, SARS coronavirus
SYCNGVREL

SEQ ID NO: 7494 - protein, 9 aa, SARS coronavirus
QYGRSGITL

SEQ ID NO: 7495 - protein, 9 aa, SARS coronavirus
LYRIDGAHL

SEQ ID NO: 7496 - protein, 9 aa, SARS coronavirus
SYKLDLTIL

SEQ ID NO: 7497 - protein, 9 aa, SARS coronavirus
VYSVFYLYL

SEQ ID NO: 7498 - protein, 9 aa, SARS coronavirus
MYASALVLL

SEQ ID NO: 7499 - protein, 9 aa, SARS coronavirus
GYGCSCDQL

SEQ ID NO: 7500 - protein, 10 aa, SARS coronavirus
NYMPYVFTLL

SEQ ID NO: 7501 - protein, 10 aa, SARS coronavirus
LYEQVVMDYL

SEQ ID NO: 7502 - protein, 10 aa, SARS coronavirus
CYLSSVLLAL

SEQ ID NO: 7503 - protein, 10 aa, SARS coronavirus
VYIAVNDKAL

SEQ ID NO: 7504 - protein, 10 aa, SARS coronavirus
CYIVMPVHTL

SEQ ID NO: 7505 - protein, 10 aa, SARS coronavirus
MYLKLRSETL

SEQ ID NO: 7506 - protein, 10 aa, SARS coronavirus
SYREAACCHL

SEQ ID NO: 7507 - protein, 10 aa, SARS coronavirus
VYKVYYGNAL

SEQ ID NO: 7508 - protein, 10 aa, SARS coronavirus
LYFIKGLNNL

SEQ ID NO: 7509 - protein, 10 aa, SARS coronavirus
AYSNKTVGEL

SEQ ID NO: 7510 - protein, 10 aa, SARS coronavirus
QYCALSPGLL

SEQ ID NO: 7511 - protein, 10 aa, SARS coronavirus
YYHTLDESFL

SEQ ID NO: 7512 - protein, 10 aa, SARS coronavirus
EYKLQQGTFL

SEQ ID NO: 7513 - protein, 10 aa, SARS coronavirus
AYYTEQPIDL

SEQ ID NO: 7514 - protein, 10 aa, SARS coronavirus
FYFTNDVSFL

SEQ ID NO: 7515 - protein, 10 aa, SARS coronavirus
GYCCCCYFGL

SEQ ID NO: 7516 - protein, 10 aa, SARS coronavirus
AYVDTFSATF

SEQ ID NO: 7517 - protein, 10 aa, SARS coronavirus
GYPLDCIKDF

SEQ ID NO: 7518 - protein, 10 aa, SARS coronavirus
QYLVQQESSF

SEQ ID NO: 7519 - protein, 10 aa, SARS coronavirus
TYERHPLSHF

SEQ ID NO: 7520 - protein, 9 aa, SARS coronavirus
MLFTKFFYL

SEQ ID NO: 7521 - protein, 9 aa, SARS coronavirus
FLARAIVFV

SEQ ID NO: 7522 - protein, 9 aa, SARS coronavirus
TQWSLFFFV

SEQ ID NO: 7523 - protein, 9 aa, SARS coronavirus
FLLPSLATV

SEQ ID NO: 7524 - protein, 9 aa, SARS coronavirus
FLLNKEMYL

SEQ ID NO: 7525 - protein, 9 aa, SARS coronavirus
WLMWFIISI

SEQ ID NO: 7526 - protein, 9 aa, SARS coronavirus
KLFTIAMWL

SEQ ID NO: 7527 - protein, 9 aa, SARS coronavirus
MLLTFLTSL

SEQ ID NO: 7528 - protein, 9 aa, SARS coronavirus
YLYLTFYFT

SEQ ID NO: 7529 - protein, 9 aa, SARS coronavirus
ALWEIQQVV

SEQ ID NO: 7530 - protein, 9 aa, SARS coronavirus
SMWALVISV

SEQ ID NO: 7531 - protein, 9 aa, SARS coronavirus
FLAHLQWFA

SEQ ID NO: 7532 - protein, 9 aa, SARS coronavirus
KLMPICMDV

SEQ ID NO: 7533 - protein, 9 aa, SARS coronavirus
FLTSLLILV

SEQ ID NO: 7534 - protein, 9 aa, SARS coronavirus
CLLNRYFRL

SEQ ID NO: 7535 - protein, 9 aa, SARS coronavirus
VLSFCAFAV

SEQ ID NO: 7536 - protein, 9 aa, SARS coronavirus
LMWFIISIV

SEQ ID NO: 7537 - protein, 9 aa, SARS coronavirus
FLITGVFDI

SEQ ID NO: 7538 - protein, 9 aa, SARS coronavirus
KLWAQCVQL

SEQ ID NO: 7539 - protein, 9 aa, SARS coronavirus
FLPRVFSAV

SEQ ID NO: 7540 - protein, 10 aa, SARS coronavirus
YMLFTKFFYL

SEQ ID NO: 7541 - protein, 10 aa, SARS coronavirus
KLFTIAMWLL

SEQ ID NO: 7542 - protein, 10 aa, SARS coronavirus
WMLLTFLTSL

SEQ ID NO: 7543 - protein, 10 aa, SARS coronavirus
YLVQQESSFV

SEQ ID NO: 7544 - protein, 10 aa, SARS coronavirus
YLTFYFTNDV

SEQ ID NO: 7545 - protein, 10 aa, SARS coronavirus
WLMWFIISIV

SEQ ID NO: 7546 - protein, 10 aa, SARS coronavirus
MLFTKFFYLL

SEQ ID NO: 7547 - protein, 10 aa, SARS coronavirus
FLMSFTILCL

SEQ ID NO: 7548 - protein, 10 aa, SARS coronavirus
LMLKATLLCV

SEQ ID NO: 7549 - protein, 10 aa, SARS coronavirus
KMSDVKCTSV

SEQ ID NO: 7550 - protein, 10 aa, SARS coronavirus
VLPQLEQPYV

SEQ ID NO: 7551 - protein, 10 aa, SARS coronavirus
KLIEYSDFAT

SEQ ID NO: 7552 - protein, 10 aa, SARS coronavirus
KLQNNELSPV

SEQ ID NO: 7553 - protein, 10 aa, SARS coronavirus
LLATNNVFRL

SEQ ID NO: 7554 - protein, 10 aa, SARS coronavirus
VLLALQQLEV

SEQ ID NO: 7555 - protein, 10 aa, SARS coronavirus
WLSNLLGTTV

SEQ ID NO: 7556 - protein, 10 aa, SARS coronavirus
LLHKPIVWHI

SEQ ID NO: 7557 - protein, 10 aa, SARS coronavirus
FLTNKLLLFA

SEQ ID NO: 7558 - protein, 10 aa, SARS coronavirus
VLNEKCSVYT

SEQ ID NO: 7559 - protein, 10 aa, SARS coronavirus
RVFNNYMPYV

SEQ ID NO: 7560 - protein, 9 aa, SARS coronavirus
KVKYLYFIK

SEQ ID NO: 7561 - protein, 9 aa, SARS coronavirus
KVIQPRVEK

SEQ ID NO: 7562 - protein, 9 aa, SARS coronavirus
AVLQSGFRK

SEQ ID NO: 7563 - protein, 9 aa, SARS coronavirus
KVTKGKPVK

SEQ ID NO: 7564 - protein, 9 aa, SARS coronavirus
RVDKVLNEK

SEQ ID NO: 7565 - protein, 9 aa, SARS coronavirus
YVKSPKFSK

SEQ ID NO: 7566 - protein, 9 aa, SARS coronavirus
VTFQGKFKK

SEQ ID NO: 7567 - protein, 9 aa, SARS coronavirus
GVIRSIFAR

SEQ ID NO: 7568 - protein, 9 aa, SARS coronavirus
GTLSYDNLK

SEQ ID NO: 7569 - protein, 9 aa, SARS coronavirus
TVWEVQGYK

SEQ ID NO: 7570 - protein, 9 aa, SARS coronavirus
QVYIAVNDK

SEQ ID NO: 7571 - protein, 9 aa, SARS coronavirus
VVENPTIQK

SEQ ID NO: 7572 - protein, 9 aa, SARS coronavirus
ATFSVPMEK

SEQ ID NO: 7573 - protein, 9 aa, SARS coronavirus
CVVAEAVVK

SEQ ID NO: 7574 - protein, 9 aa, SARS coronavirus
QVVNVITTK

SEQ ID NO: 7575 - protein, 9 aa, SARS coronavirus
GVTFQGKFK

SEQ ID NO: 7576 - protein, 9 aa, SARS coronavirus
GPVTDVFYK

SEQ ID NO: 7577 - protein, 9 aa, SARS coronavirus
GALHLYFDK

SEQ ID NO: 7578 - protein, 9 aa, SARS coronavirus
KQIRSAAKK

SEQ ID NO: 7579 - protein, 9 aa, SARS coronavirus
RIDGAHLTK

SEQ ID NO: 7580 - protein, 10 aa, SARS coronavirus
GVTFQGKFKK

SEQ ID NO: 7581 - protein, 10 aa, SARS coronavirus
KVIQPRVEKK

SEQ ID NO: 7582 - protein, 10 aa, SARS coronavirus
RTELGVEFLK

SEQ ID NO: 7583 - protein, 10 aa, SARS coronavirus
WVLAYMLFTK

SEQ ID NO: 7584 - protein, 10 aa, SARS coronavirus
GVVDTDVDTK

SEQ ID NO: 7585 - protein, 10 aa, SARS coronavirus
GTCGLVELEK

SEQ ID NO: 7586 - protein, 10 aa, SARS coronavirus
GVRFFFYTSK

SEQ ID NO: 7587 - protein, 10 aa, SARS coronavirus
GVEFLKRGDK

SEQ ID NO: 7588 - protein, 10 aa, SARS coronavirus
GVTYTEIEPK

SEQ ID NO: 7589 - protein, 10 aa, SARS coronavirus
VVMDYLDNLK

SEQ ID NO: 7590 - protein, 10 aa, SARS coronavirus
QTMLFTMLRK

SEQ ID NO: 7591 - protein, 10 aa, SARS coronavirus
TVCTVCGMWK

SEQ ID NO: 7592 - protein, 10 aa, SARS coronavirus
KLSAGVEFLK

SEQ ID NO: 7593 - protein, 10 aa, SARS coronavirus
NVLLRKNGNK

SEQ ID NO: 7594 - protein, 10 aa, SARS coronavirus
KTEEKSVVQK

SEQ ID NO: 7595 - protein, 10 aa, SARS coronavirus
SVVQKPVDVK

SEQ ID NO: 7596 - protein, 10 aa, SARS coronavirus
NVVCKHCGQK

SEQ ID NO: 7597 - protein, 10 aa, SARS coronavirus
NVITTKISLK

SEQ ID NO: 7598 - protein, 10 aa, SARS coronavirus
CTIFKDAMGK

SEQ ID NO: 7599 - protein, 10 aa, SARS coronavirus
VTCAAYYFMK

SEQ ID NO: 7600 - protein, 9 aa, SARS coronavirus
APNAKEEIL

SEQ ID NO: 7601 - protein, 9 aa, SARS coronavirus
VPMEKLKAL

SEQ ID NO: 7602 - protein, 9 aa, SARS coronavirus
DVRETMTHL

SEQ ID NO: 7603 - protein, 9 aa, SARS coronavirus
TPIAYRNVL

SEQ ID NO: 7604 - protein, 9 aa, SARS coronavirus
ALRELTREL

SEQ ID NO: 7605 - protein, 9 aa, SARS coronavirus
VPGLPGTVL

SEQ ID NO: 7606 - protein, 9 aa, SARS coronavirus
NARDGCVPL

SEQ ID NO: 7607 - protein, 9 aa, SARS coronavirus
AARRVWTLM

SEQ ID NO: 7608 - protein, 9 aa, SARS coronavirus
KPNELSLAL

SEQ ID NO: 7609 - protein, 9 aa, SARS coronavirus
HPLSHFVNL

SEQ ID NO: 7610 - protein, 9 aa, SARS coronavirus
TPRDLGACI

SEQ ID NO: 7611 - protein, 9 aa, SARS coronavirus
VPYCYDTNL

SEQ ID NO: 7612 - protein, 9 aa, SARS coronavirus
QPGQTFSVL

SEQ ID NO: 7613 - protein, 9 aa, SARS coronavirus
IPLTTAAKL

SEQ ID NO: 7614 - protein, 9 aa, SARS coronavirus
VVMDYLDNL

SEQ ID NO: 7615 - protein, 9 aa, SARS coronavirus
AVTTYNGYL

SEQ ID NO: 7616 - protein, 9 aa, SARS coronavirus
APVSAMVRM

SEQ ID NO: 7617 - protein, 9 aa, SARS coronavirus
AVKNGALHL

SEQ ID NO: 7618 - protein, 9 aa, SARS coronavirus
AVLDMCAAL

SEQ ID NO: 7619 - protein, 9 aa, SARS coronavirus
WVMRIMTWL

SEQ ID NO: 7620 - protein, 10 aa, SARS coronavirus
DVRETMTHLL

SEQ ID NO: 7621 - protein, 10 aa, SARS coronavirus
LPVLQVRDVL

SEQ ID NO: 7622 - protein, 10 aa, SARS coronavirus
TPLVQPVGAL

SEQ ID NO: 7623 - protein, 10 aa, SARS coronavirus
ALRANSAVKL

SEQ ID NO: 7624 - protein, 10 aa, SARS coronavirus
AVINGDRWFL

SEQ ID NO: 7625 - protein, 10 aa, SARS coronavirus
TPIAYRNVLL

SEQ ID NO: 7626 - protein, 10 aa, SARS coronavirus
YPLDCIKDFL

SEQ ID NO: 7627 - protein, 10 aa, SARS coronavirus
SPQECNNMHL

SEQ ID NO: 7628 - protein, 10 aa, SARS coronavirus
TPVCVNGLML

SEQ ID NO: 7629 - protein, 10 aa, SARS coronavirus
EPVNQFTGYL

SEQ ID NO: 7630 - protein, 10 aa, SARS coronavirus
GPLTVGGSCL

SEQ ID NO: 7631 - protein, 10 aa, SARS coronavirus
EPVASIITKL

SEQ ID NO: 7632 - protein, 10 aa, SARS coronavirus
KPNTWCLRCL

SEQ ID NO: 7633 - protein, 10 aa, SARS coronavirus
FPCSICLSGL

SEQ ID NO: 7634 - protein, 10 aa, SARS coronavirus
QPILLLDQAL

SEQ ID NO: 7635 - protein, 10 aa, SARS coronavirus
VPYCYDTNLL

SEQ ID NO: 7636 - protein, 10 aa, SARS coronavirus
LPGVYSVFYL

SEQ ID NO: 7637 - protein, 10 aa, SARS coronavirus
LPLTQYNRYL

SEQ ID NO: 7638 - protein, 10 aa, SARS coronavirus
TPKGPKVKYL

SEQ ID NO: 7639 - protein, 10 aa, SARS coronavirus
DPAKAYKDYL

SEQ ID NO: 7640 - protein, 9 aa, SARS coronavirus
SMEVQSLAM

SEQ ID NO: 7641 - protein, 9 aa, SARS coronavirus
ATSTRHPSK

SEQ ID NO: 7642 - protein, 9 aa, SARS coronavirus
KSFNHVLKR

SEQ ID NO: 7643 - protein, 9 aa, SARS coronavirus
ALFPNNLIT

SEQ ID NO: 7644 - protein, 9 aa, SARS coronavirus
LCTLLHLHR

SEQ ID NO: 7645 - protein, 10 aa, SARS coronavirus
SMEVQSLAMS

SEQ ID NO: 7646 - protein, 10 aa, SARS coronavirus
ALFPNNLITS

SEQ ID NO: 7647 - protein, 10 aa, SARS coronavirus
STAAVTMSMK

SEQ ID NO: 7648 - protein, 10 aa, SARS coronavirus
ALCTLLHLHR

SEQ ID NO: 7649 - protein, 9 aa, SARS coronavirus
SLCFLLTQK

SEQ ID NO: 7650 - protein, 9 aa, SARS coronavirus
ALIRATSTR

SEQ ID NO: 7651 - protein, 9 aa, SARS coronavirus
KLPGSLSAL

SEQ ID NO: 7652 - protein, 9 aa, SARS coronavirus
KSFNHVLKR

SEQ ID NO: 7653 - protein, 9 aa, SARS coronavirus
TLLIASKIF

SEQ ID NO: 7654 - protein, 9 aa, SARS coronavirus
ALFPNNLIT

SEQ ID NO: 7655 - protein, 9 aa, SARS coronavirus
RLRVSWGVY

SEQ ID NO: 7656 - protein, 9 aa, SARS coronavirus
ATSTRHPSK

SEQ ID NO: 7657 - protein, 9 aa, SARS coronavirus
LLTQKSKSF

SEQ ID NO: 7658 - protein, 9 aa, SARS coronavirus
GVYALCTLL

SEQ ID NO: 7659 - protein, 9 aa, SARS coronavirus
HLHRSVTIC

SEQ ID NO: 7660 - protein, 9 aa, SARS coronavirus
RVSWGVYAL

SEQ ID NO: 7661 - protein, 10 aa, SARS coronavirus
QMGTLLIASK

SEQ ID NO: 7662 - protein, 10 aa, SARS coronavirus
ALCTLLHLHR

SEQ ID NO: 7663 - protein, 10 aa, SARS coronavirus
RVPRNLTLSK

SEQ ID NO: 7664 - protein, 10 aa, SARS coronavirus
KLRVPRNLTL

SEQ ID NO: 7665 - protein, 10 aa, SARS coronavirus
KLPGSLSALI

SEQ ID NO: 7666 - protein, 10 aa, SARS coronavirus
KSFNHVLKRK

SEQ ID NO: 7667 - protein, 10 aa, SARS coronavirus
STAAVTMSMK

SEQ ID NO: 7668 - protein, 10 aa, SARS coronavirus
FLLTQKSKSF

SEQ ID NO: 7669 - protein, 10 aa, SARS coronavirus
LLIASKIFSH

SEQ ID NO: 7670 - protein, 10 aa, SARS coronavirus
TLSMAVVHSV

SEQ ID NO: 7671 - protein, 10 aa, SARS coronavirus
ALFPNNLITS

SEQ ID NO: 7672 - protein, 10 aa, SARS coronavirus
TLSKGNAQSL

SEQ ID NO: 7673 - protein, 10 aa, SARS coronavirus
RLRVSWGVYA

SEQ ID NO: 7674 - protein, 10 aa, SARS coronavirus
GVYALCTLLH

SEQ ID NO: 7675 - protein, 10 aa, SARS coronavirus
LLHLHRSVTI

SEQ ID NO: 7676 - protein, 10 aa, SARS coronavirus
LCFLLTQKSK

SEQ ID NO: 7677 - protein, 9 aa, SARS coronavirus
RSVTICTCL

SEQ ID NO: 7678 - protein, 9 aa, SARS coronavirus
KLPGSLSAL

SEQ ID NO: 7679 - protein, 9 aa, SARS coronavirus
KSKSFNHVL

SEQ ID NO: 7680 - protein, 9 aa, SARS coronavirus
RVSWGVYAL

SEQ ID NO: 7681 - protein, 9 aa, SARS coronavirus
AVVHSVNSL

SEQ ID NO: 7682 - protein, 9 aa, SARS coronavirus
MSMKLPGSL

SEQ ID NO: 7683 - protein, 9 aa, SARS coronavirus
NAQSLCFLL

SEQ ID NO: 7684 - protein, 9 aa, SARS coronavirus
AAVTMSMKL

SEQ ID NO: 7685 - protein, 9 aa, SARS coronavirus
ISVAQMGTL

SEQ ID NO: 7686 - protein, 9 aa, SARS coronavirus
KGNAQSLCF

SEQ ID NO: 7687 - protein, 9 aa, SARS coronavirus
WGVYALCTL

SEQ ID NO: 7688 - protein, 9 aa, SARS coronavirus
YALCTLLHL

SEQ ID NO: 7689 - protein, 9 aa, SARS coronavirus
VSSMEVQSL

SEQ ID NO: 7690 - protein, 9 aa, SARS coronavirus
QCALFPNNL

SEQ ID NO: 7691 - protein, 9 aa, SARS coronavirus
LSKGNAQSL

SEQ ID NO: 7692 - protein, 9 aa, SARS coronavirus
GVYALCTLL

SEQ ID NO: 7693 - protein, 9 aa, SARS coronavirus
TSTRHPSKL

SEQ ID NO: 7694 - protein, 9 aa, SARS coronavirus
SVAQMGTLL

SEQ ID NO: 7695 - protein, 9 aa, SARS coronavirus
HARASQCAL

SEQ ID NO: 7696 - protein, 9 aa, SARS coronavirus
GNAQSLCFL

SEQ ID NO: 7697 - protein, 10 aa, SARS coronavirus
VYALCTLLHL

SEQ ID NO: 7698 - protein, 10 aa, SARS coronavirus
KGNAQSLCFL

SEQ ID NO: 7699 - protein, 10 aa, SARS coronavirus
KLRVPRNLTL

SEQ ID NO: 7700 - protein, 10 aa, SARS coronavirus
MAVVHSVNSL

SEQ ID NO: 7701 - protein, 10 aa, SARS coronavirus
WGVYALCTLL

SEQ ID NO: 7702 - protein, 10 aa, SARS coronavirus
ISVAQMGTLL

SEQ ID NO: 7703 - protein, 10 aa, SARS coronavirus
LVSSMEVQSL

SEQ ID NO: 7704 - protein, 10 aa, SARS coronavirus
SQCALFPNNL

SEQ ID NO: 7705 - protein, 10 aa, SARS coronavirus
TMSMKLPGSL

SEQ ID NO: 7706 - protein, 10 aa, SARS coronavirus
TLSKGNAQSL

SEQ ID NO: 7707 - protein, 10 aa, SARS coronavirus
GNAQSLCFLL

SEQ ID NO: 7708 - protein, 10 aa, SARS coronavirus
TAAVTMSMKL

SEQ ID NO: 7709 - protein, 10 aa, SARS coronavirus
ATSTRHPSKL

SEQ ID NO: 7710 - protein, 10 aa, SARS coronavirus
TISVAQMGTL

SEQ ID NO: 7711 - protein, 10 aa, SARS coronavirus
FNHVLKRKRL

SEQ ID NO: 7712 - protein, 10 aa, SARS coronavirus
SWGVYALCTL

SEQ ID NO: 7713 - protein, 10 aa, SARS coronavirus
KLPGSLSALI

SEQ ID NO: 7714 - protein, 10 aa, SARS coronavirus
GTLLIASKIF

SEQ ID NO: 7715 - protein, 10 aa, SARS coronavirus
FLLTQKSKSF

SEQ ID NO: 7716 - protein, 10 aa, SARS coronavirus
HARASQCALF

SEQ ID NO: 7717 - protein, 9 aa, SARS coronavirus
KLPGSLSAL

SEQ ID NO: 7718 - protein, 9 aa, SARS coronavirus
TLLHLHRSV

SEQ ID NO: 7719 - protein, 9 aa, SARS coronavirus
YALCTLLHL

SEQ ID NO: 7720 - protein, 9 aa, SARS coronavirus
ALFPNNLIT

SEQ ID NO: 7721 - protein, 9 aa, SARS coronavirus
VVHSVNSLV

SEQ ID NO: 7722 - protein, 9 aa, SARS coronavirus
LSMAVVHSV

SEQ ID NO: 7723 - protein, 9 aa, SARS coronavirus
LAMSTTISV

SEQ ID NO: 7724 - protein, 9 aa, SARS coronavirus
GVYALCTLL

SEQ ID NO: 7725 - protein, 9 aa, SARS coronavirus
LLHLHRSVT

SEQ ID NO: 7726 - protein, 9 aa, SARS coronavirus
AVVHSVNSL

SEQ ID NO: 7727 - protein, 9 aa, SARS coronavirus
RVSWGVYAL

SEQ ID NO: 7728 - protein, 9 aa, SARS coronavirus
VLKRKRLRV

SEQ ID NO: 7729 - protein, 9 aa, SARS coronavirus
SLSALIRAT

SEQ ID NO: 7730 - protein, 9 aa, SARS coronavirus
AMSTTISVA

SEQ ID NO: 7731 - protein, 9 aa, SARS coronavirus
KTGTLSMAV

SEQ ID NO: 7732 - protein, 9 aa, SARS coronavirus
LITSSRREV

SEQ ID NO: 7733 - protein, 9 aa, SARS coronavirus
VQSLAMSTT

SEQ ID NO: 7734 - protein, 9 aa, SARS coronavirus
KLRVPRNLT

SEQ ID NO: 7735 - protein, 9 aa, SARS coronavirus
SVAQMGTLL

SEQ ID NO: 7736 - protein, 9 aa, SARS coronavirus
GNAQSLCFL

SEQ ID NO: 7737 - protein, 10 aa, SARS coronavirus
TLSMAVVHSV

SEQ ID NO: 7738 - protein, 10 aa, SARS coronavirus
SLAMSTTISV

SEQ ID NO: 7739 - protein, 10 aa, SARS coronavirus
KLPGSLSALI

SEQ ID NO: 7740 - protein, 10 aa, SARS coronavirus
TLSKGNAQSL

SEQ ID NO: 7741 - protein, 10 aa, SARS coronavirus
LLHLHRSVTI

SEQ ID NO: 7742 - protein, 10 aa, SARS coronavirus
NLITSSRREV

SEQ ID NO: 7743 - protein, 10 aa, SARS coronavirus
TLLHLHRSVT

SEQ ID NO: 7744 - protein, 10 aa, SARS coronavirus
SQCALFPNNL

SEQ ID NO: 7745 - protein, 10 aa, SARS coronavirus
LVSSMEVQSL

SEQ ID NO: 7746 - protein, 10 aa, SARS coronavirus
KGNAQSLCFL

SEQ ID NO: 7747 - protein, 10 aa, SARS coronavirus
AVVHSVNSLV

SEQ ID NO: 7748 - protein, 10 aa, SARS coronavirus
KLRVPRNLTL

SEQ ID NO: 7749 - protein, 10 aa, SARS coronavirus
KTGTLSMAVV

SEQ ID NO: 7750 - protein, 10 aa, SARS coronavirus
LIASKIFSHA

SEQ ID NO: 7751 - protein, 10 aa, SARS coronavirus
RLRVSWGVYA

SEQ ID NO: 7752 - protein, 10 aa, SARS coronavirus
TMSMKLPGSL

SEQ ID NO: 7753 - protein, 10 aa, SARS coronavirus
VQSLAMSTTI

SEQ ID NO: 7754 - protein, 10 aa, SARS coronavirus
LLIASKIFSH

SEQ ID NO: 7755 - protein, 10 aa, SARS coronavirus
TLLIASKIFS

SEQ ID NO: 7756 - protein, 10 aa, SARS coronavirus
FLLTQKSKSF

SEQ ID NO: 7757 - protein, 9 aa, SARS coronavirus
ATSTRHPSK

SEQ ID NO: 7758 - protein, 10 aa, SARS coronavirus
RVPRNLTLSK

SEQ ID NO: 7759 - protein, 10 aa, SARS coronavirus
STAAVTMSMK

SEQ ID NO: 7760 - protein, 10 aa, SARS coronavirus
RATSTRHPSK

SEQ ID NO: 7761 - protein, 9 aa, SARS coronavirus
HARASQCAL

SEQ ID NO: 7762 - protein, 9 aa, SARS coronavirus
AVVHSVNSL

SEQ ID NO: 7763 - protein, 9 aa, SARS coronavirus
AAVTMSMKL

SEQ ID NO: 7764 - protein, 9 aa, SARS coronavirus
SVAQMGTLL

SEQ ID NO: 7765 - protein, 9 aa, SARS coronavirus
RVSWGVYAL

SEQ ID NO: 7766 - protein, 9 aa, SARS coronavirus
GVYALCTLL

SEQ ID NO: 7767 - protein, 9 aa, SARS coronavirus
MSMKLPGSL

SEQ ID NO: 7768 - protein, 9 aa, SARS coronavirus
NAQSLCFLL

SEQ ID NO: 7769 - protein, 9 aa, SARS coronavirus
YALCTLLHL

SEQ ID NO: 7770 - protein, 9 aa, SARS coronavirus
LPGSLSALI

SEQ ID NO: 7771 - protein, 9 aa, SARS coronavirus
SVNSLVSSM

SEQ ID NO: 7772 - protein, 9 aa, SARS coronavirus
EVSTAAVTM

SEQ ID NO: 7773 - protein, 9 aa, SARS coronavirus
VSSMEVQSL

SEQ ID NO: 7774 - protein, 9 aa, SARS coronavirus
ISVAQMGTL

SEQ ID NO: 7775 - protein, 9 aa, SARS coronavirus
QCALFPNNL

SEQ ID NO: 7776 - protein, 9 aa, SARS coronavirus
KLPGSLSAL

SEQ ID NO: 7777 - protein, 9 aa, SARS coronavirus
TSTRHPSKL

SEQ ID NO: 7778 - protein, 9 aa, SARS coronavirus
LSKGNAQSL

SEQ ID NO: 7779 - protein, 9 aa, SARS coronavirus
GNAQSLCFL

SEQ ID NO: 7780 - protein, 9 aa, SARS coronavirus
KSKSFNHVL

SEQ ID NO: 7781 - protein, 10 aa, SARS coronavirus
KLRVPRNLTL

SEQ ID NO: 7782 - protein, 10 aa, SARS coronavirus
LVSSMEVQSL

SEQ ID NO: 7783 - protein, 10 aa, SARS coronavirus
MAVVHSVNSL

SEQ ID NO: 7784 - protein, 10 aa, SARS coronavirus
TAAVTMSMKL

SEQ ID NO: 7785 - protein, 10 aa, SARS coronavirus
ATSTRHPSKL

SEQ ID NO: 7786 - protein, 10 aa, SARS coronavirus
FNHVLKRKRL

SEQ ID NO: 7787 - protein, 10 aa, SARS coronavirus
TISVAQMGTL

SEQ ID NO: 7788 - protein, 10 aa, SARS coronavirus
ISVAQMGTLL

SEQ ID NO: 7789 - protein, 10 aa, SARS coronavirus
SQCALFPNNL

SEQ ID NO: 7790 - protein, 10 aa, SARS coronavirus
TMSMKLPGSL

SEQ ID NO: 7791 - protein, 10 aa, SARS coronavirus
TLSKGNAQSL

SEQ ID NO: 7792 - protein, 10 aa, SARS coronavirus
KGNAQSLCFL

SEQ ID NO: 7793 - protein, 10 aa, SARS coronavirus
GNAQSLCFLL

SEQ ID NO: 7794 - protein, 10 aa, SARS coronavirus
WGVYALCTLL

SEQ ID NO: 7795 - protein, 10 aa, SARS coronavirus
AVVHSVNSLV

SEQ ID NO: 7796 - protein, 10 aa, SARS coronavirus
SSMEVQSLAM

SEQ ID NO: 7797 - protein, 10 aa, SARS coronavirus
SVAQMGTLLI

SEQ ID NO: 7798 - protein, 10 aa, SARS coronavirus
STRHPSKLRV

SEQ ID NO: 7799 - protein, 10 aa, SARS coronavirus
VPRNLTLSKG

SEQ ID NO: 7800 - protein, 10 aa, SARS coronavirus
HVLKRKRLRV

SEQ ID NO: 7801 - protein, 9 aa, SARS coronavirus
KIEELFYSY

SEQ ID NO: 7802 - protein, 9 aa, SARS coronavirus
ISDYDYYRY

SEQ ID NO: 7803 - protein, 9 aa, SARS coronavirus
LSDDAVVCY

SEQ ID NO: 7804 - protein, 9 aa, SARS coronavirus
CCDDDYFNK

SEQ ID NO: 7805 - protein, 9 aa, SARS coronavirus
AIDAYPLTK

SEQ ID NO: 7806 - protein, 9 aa, SARS coronavirus
CVDIPGIPK

SEQ ID NO: 7807 - protein, 9 aa, SARS coronavirus
FVENPDILR

SEQ ID NO: 7808 - protein, 9 aa, SARS coronavirus
SVELKHFFF

SEQ ID NO: 7809 - protein, 9 aa, SARS coronavirus
TLEPEYFNS

SEQ ID NO: 7810 - protein, 9 aa, SARS coronavirus
QAEVEWKFY

SEQ ID NO: 7811 - protein, 9 aa, SARS coronavirus
GSEYDYVIF

SEQ ID NO: 7812 - protein, 9 aa, SARS coronavirus
MCDIRQLLF

SEQ ID NO: 7813 - protein, 9 aa, SARS coronavirus
TIDYAEISF

SEQ ID NO: 7814 - protein, 9 aa, SARS coronavirus
FTEERLCLF

SEQ ID NO: 7815 - protein, 9 aa, SARS coronavirus
EPEFYEAMY

SEQ ID NO: 7816 - protein, 9 aa, SARS coronavirus
YGENAVIPK

SEQ ID NO: 7817 - protein, 9 aa, SARS coronavirus
RVECFDKFK

SEQ ID NO: 7818 - protein, 9 aa, SARS coronavirus
DVEGCHATR

SEQ ID NO: 7819 - protein, 9 aa, SARS coronavirus
AMDEFIQRY

SEQ ID NO: 7820 - protein, 9 aa, SARS coronavirus
TEETFKLSY

SEQ ID NO: 7821 - protein, 10 aa, SARS coronavirus
ATEETFKLSY

SEQ ID NO: 7822 - protein, 10 aa, SARS coronavirus
IVDTVSALVY

SEQ ID NO: 7823 - protein, 10 aa, SARS coronavirus
DTENNTEFTR

SEQ ID NO: 7824 - protein, 10 aa, SARS coronavirus
QAENVTGLFK

SEQ ID NO: 7825 - protein, 10 aa, SARS coronavirus
KTDGTLMIER

SEQ ID NO: 7826 - protein, 10 aa, SARS coronavirus
DADLAKPLIK

SEQ ID NO: 7827 - protein, 10 aa, SARS coronavirus
STDGNKIADK

SEQ ID NO: 7828 - protein, 10 aa, SARS coronavirus
LLDDFVEIIK

SEQ ID NO: 7829 - protein, 10 aa, SARS coronavirus
NTEFTRVNAK

SEQ ID NO: 7830 - protein, 10 aa, SARS coronavirus
RVEGQVDLFR

SEQ ID NO: 7831 - protein, 10 aa, SARS coronavirus
QGDDYVYLPY

SEQ ID NO: 7832 - protein, 10 aa, SARS coronavirus
VSDIDYVPLK

SEQ ID NO: 7833 - protein, 10 aa, SARS coronavirus
TCDWTNAGDY

SEQ ID NO: 7834 - protein, 10 aa, SARS coronavirus
TVDSSQGSEY

SEQ ID NO: 7835 - protein, 10 aa, SARS coronavirus
ITDAQTGSSK

SEQ ID NO: 7836 - protein, 10 aa, SARS coronavirus
ISDMYDPRTK

SEQ ID NO: 7837 - protein, 10 aa, SARS coronavirus
KGDYGDAVVY

SEQ ID NO: 7838 - protein, 10 aa, SARS coronavirus
NTNPIQLSSY

SEQ ID NO: 7839 - protein, 10 aa, SARS coronavirus
CCDDDYFNKK

SEQ ID NO: 7840 - protein, 10 aa, SARS coronavirus
AADPAMHAAS

SEQ ID NO: 7841 - protein, 9 aa, SARS coronavirus
HLMGWDYPK

SEQ ID NO: 7842 - protein, 9 aa, SARS coronavirus
KLFAAETLK

SEQ ID NO: 7843 - protein, 9 aa, SARS coronavirus
HLYLQYIRK

SEQ ID NO: 7844 - protein, 9 aa, SARS coronavirus
KMQRMLLEK

SEQ ID NO: 7845 - protein, 9 aa, SARS coronavirus
YLCGFIKQK

SEQ ID NO: 7846 - protein, 9 aa, SARS coronavirus
CLFDRYFKY

SEQ ID NO: 7847 - protein, 9 aa, SARS coronavirus
KLVLSVNPY

SEQ ID NO: 7848 - protein, 9 aa, SARS coronavirus
SMMGFKMNY

SEQ ID NO: 7849 - protein, 9 aa, SARS coronavirus
ALGGSIAVK

SEQ ID NO: 7850 - protein, 9 aa, SARS coronavirus
RLYYDSMSY

SEQ ID NO: 7851 - protein, 9 aa, SARS coronavirus
QLYLGGMSY

SEQ ID NO: 7852 - protein, 9 aa, SARS coronavirus
ALKYLPIDK

SEQ ID NO: 7853 - protein, 9 aa, SARS coronavirus
KMNYQVNGY

SEQ ID NO: 7854 - protein, 9 aa, SARS coronavirus
NLKYAISAK

SEQ ID NO: 7855 - protein, 9 aa, SARS coronavirus
VLHDIGNPK

SEQ ID NO: 7856 - protein, 9 aa, SARS coronavirus
ELWAKRNIK

SEQ ID NO: 7857 - protein, 9 aa, SARS coronavirus
VLITEGSVK

SEQ ID NO: 7858 - protein, 9 aa, SARS coronavirus
QIGEYTFEK

SEQ ID NO: 7859 - protein, 9 aa, SARS coronavirus
AMDEFIQRY

SEQ ID NO: 7860 - protein, 9 aa, SARS coronavirus
DMIYSLLEK

SEQ ID NO: 7861 - protein, 10 aa, SARS coronavirus
LLFVVEVVDK

SEQ ID NO: 7862 - protein, 10 aa, SARS coronavirus
GLHLMIGLAK

SEQ ID NO: 7863 - protein, 10 aa, SARS coronavirus
VMCGGSLYVK

SEQ ID NO: 7864 - protein, 10 aa, SARS coronavirus
GLVASIKNFK

SEQ ID NO: 7865 - protein, 10 aa, SARS coronavirus
YLGGMSYYCK

SEQ ID NO: 7866 - protein, 10 aa, SARS coronavirus
FLTRNPAWRK

SEQ ID NO: 7867 - protein, 10 aa, SARS coronavirus
IMSDRDLYDK

SEQ ID NO: 7868 - protein, 10 aa, SARS coronavirus
FLIGANYLGK

SEQ ID NO: 7869 - protein, 10 aa, SARS coronavirus
RLCLFDRYFK

SEQ ID NO: 7870 - protein, 10 aa, SARS coronavirus
TMTNRQFHQK

SEQ ID NO: 7871 - protein, 10 aa, SARS coronavirus
GMSYYCKSHK

SEQ ID NO: 7872 - protein, 10 aa, SARS coronavirus
CLAVHECFVK

SEQ ID NO: 7873 - protein, 10 aa, SARS coronavirus
LLDDFVEIIK

SEQ ID NO: 7874 - protein, 10 aa, SARS coronavirus
NLKQLPFFYY

SEQ ID NO: 7875 - protein, 10 aa, SARS coronavirus
TMHANYIFWR

SEQ ID NO: 7876 - protein, 10 aa, SARS coronavirus
IMASLVLARK

SEQ ID NO: 7877 - protein, 10 aa, SARS coronavirus
TLQGPPGTGK

SEQ ID NO: 7878 - protein, 10 aa, SARS coronavirus
GLALYYPSAR

SEQ ID NO: 7879 - protein, 10 aa, SARS coronavirus
NLHSSRLSFK

SEQ ID NO: 7880 - protein, 10 aa, SARS coronavirus
QLYLGGMSYY

SEQ ID NO: 7881 - protein, 9 aa, SARS coronavirus
KYTQLCQYL

SEQ ID NO: 7882 - protein, 9 aa, SARS coronavirus
EYPIIGDEL

SEQ ID NO: 7883 - protein, 9 aa, SARS coronavirus
KYDFTEERL

SEQ ID NO: 7884 - protein, 9 aa, SARS coronavirus
DYAEISFML

SEQ ID NO: 7885 - protein, 9 aa, SARS coronavirus
LYLQYIRKL

SEQ ID NO: 7886 - protein, 9 aa, SARS coronavirus
VYIGDPAQL

SEQ ID NO: 7887 - protein, 9 aa, SARS coronavirus
YYSLLMPIL

SEQ ID NO: 7888 - protein, 9 aa, SARS coronavirus
FYGGWHNML

SEQ ID NO: 7889 - protein, 9 aa, SARS coronavirus
DYDYYRYNL

SEQ ID NO: 7890 - protein, 9 aa, SARS coronavirus
EYFNSVCRL

SEQ ID NO: 7891 - protein, 9 aa, SARS coronavirus
TYFTQSRDL

SEQ ID NO: 7892 - protein, 9 aa, SARS coronavirus
RYKLEGYAF

SEQ ID NO: 7893 - protein, 9 aa, SARS coronavirus
LYKMQRMLL

SEQ ID NO: 7894 - protein, 9 aa, SARS coronavirus
SYEDQDALF

SEQ ID NO: 7895 - protein, 9 aa, SARS coronavirus
FYAYLRKHF

SEQ ID NO: 7896 - protein, 9 aa, SARS coronavirus
SYATHHDKF

SEQ ID NO: 7897 - protein, 9 aa, SARS coronavirus
DYVYNPFMI

SEQ ID NO: 7898 - protein, 9 aa, SARS coronavirus
SYYSLLMPI

SEQ ID NO: 7899 - protein, 9 aa, SARS coronavirus
GYTMHANYI

SEQ ID NO: 7900 - protein, 9 aa, SARS coronavirus
QYLDAYNMM

SEQ ID NO: 7901 - protein, 10 aa, SARS coronavirus
KYVRNLQHRL

SEQ ID NO: 7902 - protein, 10 aa, SARS coronavirus
QYIRKLHDEL

SEQ ID NO: 7903 - protein, 10 aa, SARS coronavirus
QYVFCTVNAL

SEQ ID NO: 7904 - protein, 10 aa, SARS coronavirus
TYHPNCINCL

SEQ ID NO: 7905 - protein, 10 aa, SARS coronavirus
SYYSLLMPIL

SEQ ID NO: 7906 - protein, 10 aa, SARS coronavirus
VYSDVETPHL

SEQ ID NO: 7907 - protein, 10 aa, SARS coronavirus
EYADVFHLYL

SEQ ID NO: 7908 - protein, 10 aa, SARS coronavirus
LYDKLQFTSL

SEQ ID NO: 7909 - protein, 10 aa, SARS coronavirus
VYGDFSHGQL

SEQ ID NO: 7910 - protein, 10 aa, SARS coronavirus
VYRGTTTYKL

SEQ ID NO: 7911 - protein, 10 aa, SARS coronavirus
AYNMMISAGF

SEQ ID NO: 7912 - protein, 10 aa, SARS coronavirus
IYKQFDTYNL

SEQ ID NO: 7913 - protein, 10 aa, SARS coronavirus
IYSLLEKGRL

SEQ ID NO: 7914 - protein, 10 aa, SARS coronavirus
TYNCCDDDYF

SEQ ID NO: 7915 - protein, 10 aa, SARS coronavirus
RYNLPTMCDI

SEQ ID NO: 7916 - protein, 10 aa, SARS coronavirus
AYNVVNKGHF

SEQ ID NO: 7917 - protein, 10 aa, SARS coronavirus
FYDFAVSKGF

SEQ ID NO: 7918 - protein, 10 aa, SARS coronavirus
TYKLNVGDYF

SEQ ID NO: 7919 - protein, 10 aa, SARS coronavirus
SYSLFDMSKF

SEQ ID NO: 7920 - protein, 10 aa, SARS coronavirus
GYTMHANYIF

SEQ ID NO: 7921 - protein, 9 aa, SARS coronavirus
GLSDRVVFV

SEQ ID NO: 7922 - protein, 9 aa, SARS coronavirus
VLWAHGFEL

SEQ ID NO: 7923 - protein, 9 aa, SARS coronavirus
ALLADKFPV

SEQ ID NO: 7924 - protein, 9 aa, SARS coronavirus
LMGHFSWWT

SEQ ID NO: 7925 - protein, 9 aa, SARS coronavirus
KLNVGDYFV

SEQ ID NO: 7926 - protein, 9 aa, SARS coronavirus
ILHCANFNV

SEQ ID NO: 7927 - protein, 9 aa, SARS coronavirus
KLSYGIATV

SEQ ID NO: 7928 - protein, 9 aa, SARS coronavirus
FMSEAKCWT

SEQ ID NO: 7929 - protein, 9 aa, SARS coronavirus
LLLDDFVEI

SEQ ID NO: 7930 - protein, 9 aa, SARS coronavirus
VMCGGSLYV

SEQ ID NO: 7931 - protein, 9 aa, SARS coronavirus
FVDEFYAYL

SEQ ID NO: 7932 - protein, 9 aa, SARS coronavirus
TLVPQEHYV

SEQ ID NO: 7933 - protein, 9 aa, SARS coronavirus
CLAVHECFV

SEQ ID NO: 7934 - protein, 9 aa, SARS coronavirus
MLSDTLKGL

SEQ ID NO: 7935 - protein, 9 aa, SARS coronavirus
NLWNTFTRL

SEQ ID NO: 7936 - protein, 9 aa, SARS coronavirus
YLNTLTLAV

SEQ ID NO: 7937 - protein, 9 aa, SARS coronavirus
WLPTGTLLV

SEQ ID NO: 7938 - protein, 9 aa, SARS coronavirus
KQGDDYVYL

SEQ ID NO: 7939 - protein, 9 aa, SARS coronavirus
SLLKTVQFC

SEQ ID NO: 7940 - protein, 9 aa, SARS coronavirus
RQLLFVVEV

SEQ ID NO: 7941 - protein, 10 aa, SARS coronavirus
KLMGHFSWWT

SEQ ID NO: 7942 - protein, 10 aa, SARS coronavirus
LMYKGLPWNV

SEQ ID NO: 7943 - protein, 10 aa, SARS coronavirus
SLFDMSKFPL

SEQ ID NO: 7944 - protein, 10 aa, SARS coronavirus
KIFVDGVPFV

SEQ ID NO: 7945 - protein, 10 aa, SARS coronavirus
KLVLSVNPYV

SEQ ID NO: 7946 - protein, 10 aa, SARS coronavirus
ALCEKALKYL

SEQ ID NO: 7947 - protein, 10 aa, SARS coronavirus
YVYNPFMIDV

SEQ ID NO: 7948 - protein, 10 aa, SARS coronavirus
AVHDFFKFRV

SEQ ID NO: 7949 - protein, 10 aa, SARS coronavirus
GLSDRVVFVL

SEQ ID NO: 7950 - protein, 10 aa, SARS coronavirus
LLLDDFVEII

SEQ ID NO: 7951 - protein, 10 aa, SARS coronavirus
SLWIYKQFDT

SEQ ID NO: 7952 - protein, 10 aa, SARS coronavirus
NMMISAGFSL

SEQ ID NO: 7953 - protein, 10 aa, SARS coronavirus
MLVKQGDDYV

SEQ ID NO: 7954 - protein, 10 aa, SARS coronavirus
NMLKTVYSDV

SEQ ID NO: 7955 - protein, 10 aa, SARS coronavirus
KLNVGDYFVL

SEQ ID NO: 7956 - protein, 10 aa, SARS coronavirus
KLALGGSIAV

SEQ ID NO: 7957 - protein, 10 aa, SARS coronavirus
LMIERFVSLA

SEQ ID NO: 7958 - protein, 10 aa, SARS coronavirus
AVHECFVKRV

SEQ ID NO: 7959 - protein, 10 aa, SARS coronavirus
MVMCGGSLYV

SEQ ID NO: 7960 - protein, 10 aa, SARS coronavirus
CILHCANFNV

SEQ ID NO: 7961 - protein, 9 aa, SARS coronavirus
GVAMPNLYK

SEQ ID NO: 7962 - protein, 9 aa, SARS coronavirus
KTQFNYFKK

SEQ ID NO: 7963 - protein, 9 aa, SARS coronavirus
RQFHQKLLK

SEQ ID NO: 7964 - protein, 9 aa, SARS coronavirus
AVAVHDFFK

SEQ ID NO: 7965 - protein, 9 aa, SARS coronavirus
TVKPGNFNK

SEQ ID NO: 7966 - protein, 9 aa, SARS coronavirus
QVIVNNLDK

SEQ ID NO: 7967 - protein, 9 aa, SARS coronavirus
FTYLCGFIK

SEQ ID NO: 7968 - protein, 9 aa, SARS coronavirus
CVDIPGIPK

SEQ ID NO: 7969 - protein, 9 aa, SARS coronavirus
NVAFELWAK

SEQ ID NO: 7970 - protein, 9 aa, SARS coronavirus
GVVREFLTR

SEQ ID NO: 7971 - protein, 9 aa, SARS coronavirus
RVECFDKFK

SEQ ID NO: 7972 - protein, 9 aa, SARS coronavirus
LTSMKYFVK

SEQ ID NO: 7973 - protein, 9 aa, SARS coronavirus
RVYANLGER

SEQ ID NO: 7974 - protein, 9 aa, SARS coronavirus
GCFVDDIVK

SEQ ID NO: 7975 - protein, 9 aa, SARS coronavirus
KLFAAETLK

SEQ ID NO: 7976 - protein, 9 aa, SARS coronavirus
KMQRMLLEK

SEQ ID NO: 7977 - protein, 9 aa, SARS coronavirus
LVASIKNFK

SEQ ID NO: 7978 - protein, 9 aa, SARS coronavirus
LTRNPAWRK

SEQ ID NO: 7979 - protein, 9 aa, SARS coronavirus
NVAYNVVNK

SEQ ID NO: 7980 - protein, 9 aa, SARS coronavirus
CTMTDIAKK

SEQ ID NO: 7981 - protein, 10 aa, SARS coronavirus
GVCTMTDIAK

SEQ ID NO: 7982 - protein, 10 aa, SARS coronavirus
GVLITEGSVK

SEQ ID NO: 7983 - protein, 10 aa, SARS coronavirus
GVTLIGESVK

SEQ ID NO: 7984 - protein, 10 aa, SARS coronavirus
QTVKPGNFNK

SEQ ID NO: 7985 - protein, 10 aa, SARS coronavirus
YVFTGYRVTK

SEQ ID NO: 7986 - protein, 10 aa, SARS coronavirus
VVYRGTTTYK

SEQ ID NO: 7987 - protein, 10 aa, SARS coronavirus
SVKTQFNYFK

SEQ ID NO: 7988 - protein, 10 aa, SARS coronavirus
VQIGEYTFEK

SEQ ID NO: 7989 - protein, 10 aa, SARS coronavirus
RLCLFDRYFK

SEQ ID NO: 7990 - protein, 10 aa, SARS coronavirus
KCWTETDLTK

SEQ ID NO: 7991 - protein, 10 aa, SARS coronavirus
RVEGQVDLFR

SEQ ID NO: 7992 - protein, 10 aa, SARS coronavirus
GLHLMIGLAK

SEQ ID NO: 7993 - protein, 10 aa, SARS coronavirus
TVSALVYDNK

SEQ ID NO: 7994 - protein, 10 aa, SARS coronavirus
IVQMLSDTLK

SEQ ID NO: 7995 - protein, 10 aa, SARS coronavirus
VVKSALLADK

SEQ ID NO: 7996 - protein, 10 aa, SARS coronavirus
CVPQAEVEWK

SEQ ID NO: 7997 - protein, 10 aa, SARS coronavirus
KPLIKWDLLK

SEQ ID NO: 7998 - protein, 10 aa, SARS coronavirus
NQVIVNNLDK

SEQ ID NO: 7999 - protein, 10 aa, SARS coronavirus
GLVASIKNFK

SEQ ID NO: 8000 - protein, 10 aa, SARS coronavirus
KALKYLPIDK

SEQ ID NO: 8001 - protein, 9 aa, SARS coronavirus
IPRRNVATL

SEQ ID NO: 8002 - protein, 9 aa, SARS coronavirus
YVRNLQHRL

SEQ ID NO: 8003 - protein, 9 aa, SARS coronavirus
VPHISRQRL

SEQ ID NO: 8004 - protein, 9 aa, SARS coronavirus
KPLIKWDLL

SEQ ID NO: 8005 - protein, 9 aa, SARS coronavirus
FPPTSFGPL

SEQ ID NO: 8006 - protein, 9 aa, SARS coronavirus
IPTITQMNL

SEQ ID NO: 8007 - protein, 9 aa, SARS coronavirus
HPTQAPTHL

SEQ ID NO: 8008 - protein, 9 aa, SARS coronavirus
LPGCDGGSL

SEQ ID NO: 8009 - protein, 9 aa, SARS coronavirus
LPVNVAFEL

SEQ ID NO: 8010 - protein, 9 aa, SARS coronavirus
KPVPEIKIL

SEQ ID NO: 8011 - protein, 9 aa, SARS coronavirus
QPGVAMPNL

SEQ ID NO: 8012 - protein, 9 aa, SARS coronavirus
AVTANVNAL

SEQ ID NO: 8013 - protein, 9 aa, SARS coronavirus
AVASKILGL

SEQ ID NO: 8014 - protein, 9 aa, SARS coronavirus
VVRIKIVQM

SEQ ID NO: 8015 - protein, 9 aa, SARS coronavirus
EVGKPRPPL

SEQ ID NO: 8016 - protein, 9 aa, SARS coronavirus
SSRLSFKEL

SEQ ID NO: 8017 - protein, 9 aa, SARS coronavirus
TNRQFHQKL

SEQ ID NO: 8018 - protein, 9 aa, SARS coronavirus
YIRKLHDEL

SEQ ID NO: 8019 - protein, 9 aa, SARS coronavirus
ITRAKIGIL

SEQ ID NO: 8020 - protein, 9 aa, SARS coronavirus
VCRFDTRVL

SEQ ID NO: 8021 - protein, 10 aa, SARS coronavirus
VVRIKIVQML

SEQ ID NO: 8022 - protein, 10 aa, SARS coronavirus
LPYPDPSRIL

SEQ ID NO: 8023 - protein, 10 aa, SARS coronavirus
ATRDAVGTNL

SEQ ID NO: 8024 - protein, 10 aa, SARS coronavirus
VPIVDSYYSL

SEQ ID NO: 8025 - protein, 10 aa, SARS coronavirus
MPILTLTRAL

SEQ ID NO: 8026 - protein, 10 aa, SARS coronavirus
LPTMCDIRQL

SEQ ID NO: 8027 - protein, 10 aa, SARS coronavirus
IPKDMTYRRL

SEQ ID NO: 8028 - protein, 10 aa, SARS coronavirus
KPTESACSSL

SEQ ID NO: 8029 - protein, 10 aa, SARS coronavirus
NPIQLSSYSL

SEQ ID NO: 8030 - protein, 10 aa, SARS coronavirus
AVTANVNALL

SEQ ID NO: 8031 - protein, 10 aa, SARS coronavirus
TVMPLSAPTL

SEQ ID NO: 8032 - protein, 10 aa, SARS coronavirus
APRTLLTKGT

SEQ ID NO: 8033 - protein, 10 aa, SARS coronavirus
AVGTNLPLQL

SEQ ID NO: 8034 - protein, 10 aa, SARS coronavirus
EAMYTPHTVL

SEQ ID NO: 8035 - protein, 10 aa, SARS coronavirus
SSRLSFKELL

SEQ ID NO: 8036 - protein, 10 aa, SARS coronavirus
TNRQFHQKLL

SEQ ID NO: 8037 - protein, 10 aa, SARS coronavirus
MLRIMASLVL

SEQ ID NO: 8038 - protein, 10 aa, SARS coronavirus
DTRVLSNLNL

SEQ ID NO: 8039 - protein, 10 aa, SARS coronavirus
DGRVEGQVDL

SEQ ID NO: 8040 - protein, 10 aa, SARS coronavirus
KLRGTAVMSL

SEQ ID NO: 8041 - protein, 9 aa, SARS coronavirus
LTDDMIAAY

SEQ ID NO: 8042 - protein, 9 aa, SARS coronavirus
FIEDLLFNK

SEQ ID NO: 8043 - protein, 9 aa, SARS coronavirus
LPDPLKPTK

SEQ ID NO: 8044 - protein, 9 aa, SARS coronavirus
LIDLQELGK

SEQ ID NO: 8045 - protein, 9 aa, SARS coronavirus
GAEHVDTSY

SEQ ID NO: 8046 - protein, 9 aa, SARS coronavirus
FTDSVRDPK

SEQ ID NO: 8047 - protein, 9 aa, SARS coronavirus
RVDFCGKGY

SEQ ID NO: 8048 - protein, 9 aa, SARS coronavirus
LAELKCSVK

SEQ ID NO: 8049 - protein, 9 aa, SARS coronavirus
DSEPVLKGV

SEQ ID NO: 8050 - protein, 9 aa, SARS coronavirus
CTPPALNCY

SEQ ID NO: 8051 - protein, 9 aa, SARS coronavirus
STECANLLL

SEQ ID NO: 8052 - protein, 9 aa, SARS coronavirus
EVMPVSMAK

SEQ ID NO: 8053 - protein, 9 aa, SARS coronavirus
FGEVFNATK

SEQ ID NO: 8054 - protein, 9 aa, SARS coronavirus
AAEQDRNTR

SEQ ID NO: 8055 - protein, 9 aa, SARS coronavirus
TQDLFLPFY

SEQ ID NO: 8056 - protein, 9 aa, SARS coronavirus
VSDFTDSVR

SEQ ID NO: 8057 - protein, 9 aa, SARS coronavirus
SSEVAVLYQ

SEQ ID NO: 8058 - protein, 9 aa, SARS coronavirus
ILDISPCAF

SEQ ID NO: 8059 - protein, 9 aa, SARS coronavirus
QLTPAWRIY

SEQ ID NO: 8060 - protein, 9 aa, SARS coronavirus
ATEKSNVVR

SEQ ID NO: 8061 - protein, 10 aa, SARS coronavirus
DSEPVLKGVK

SEQ ID NO: 8062 - protein, 10 aa, SARS coronavirus
KVEAEVQIDR

SEQ ID NO: 8063 - protein, 10 aa, SARS coronavirus
MSECVLGQSK

SEQ ID NO: 8064 - protein, 10 aa, SARS coronavirus
NIDATSTGNY

SEQ ID NO: 8065 - protein, 10 aa, SARS coronavirus
LADAGFMKQY

SEQ ID NO: 8066 - protein, 10 aa, SARS coronavirus
LIDLQELGKY

SEQ ID NO: 8067 - protein, 10 aa, SARS coronavirus
LPDPLKPTKR

SEQ ID NO: 8068 - protein, 10 aa, SARS coronavirus
LNDILSRLDK

SEQ ID NO: 8069 - protein, 10 aa, SARS coronavirus
STECANLLLQ

SEQ ID NO: 8070 - protein, 10 aa, SARS coronavirus
HADQLTPAWR

SEQ ID NO: 8071 - protein, 10 aa, SARS coronavirus
GSDLDRCTTF

SEQ ID NO: 8072 - protein, 10 aa, SARS coronavirus
LQELGKYEQY

SEQ ID NO: 8073 - protein, 10 aa, SARS coronavirus
LNDLCFSNVY

SEQ ID NO: 8074 - protein, 10 aa, SARS coronavirus
CTDVSTAIHA

SEQ ID NO: 8075 - protein, 10 aa, SARS coronavirus
TFDDVQAPNY

SEQ ID NO: 8076 - protein, 10 aa, SARS coronavirus
HTSSMRGVYY

SEQ ID NO: 8077 - protein, 10 aa, SARS coronavirus
LTQDLFLPFY

SEQ ID NO: 8078 - protein, 10 aa, SARS coronavirus
QTGVIADYNY

SEQ ID NO: 8079 - protein, 10 aa, SARS coronavirus
FTDSVRDPKT

SEQ ID NO: 8080 - protein, 10 aa, SARS coronavirus
STSQKSIVAY

SEQ ID NO: 8081 - protein, 9 aa, SARS coronavirus
QMYKTPTLK

SEQ ID NO: 8082 - protein, 9 aa, SARS coronavirus
TLADAGFMK

SEQ ID NO: 8083 - protein, 9 aa, SARS coronavirus
GIYFAATEK

SEQ ID NO: 8084 - protein, 9 aa, SARS coronavirus
SLLRSTSQK

SEQ ID NO: 8085 - protein, 9 aa, SARS coronavirus
VLKGVKLHY

SEQ ID NO: 8086 - protein, 9 aa, SARS coronavirus
SVKSFEIDK

SEQ ID NO: 8087 - protein, 9 aa, SARS coronavirus
TLYLTQDLF

SEQ ID NO: 8088 - protein, 9 aa, SARS coronavirus
NLCPFGEVF

SEQ ID NO: 8089 - protein, 9 aa, SARS coronavirus
GVIADYNYK

SEQ ID NO: 8090 - protein, 9 aa, SARS coronavirus
FIEDLLFNK

SEQ ID NO: 8091 - protein, 9 aa, SARS coronavirus
KQIANQFNK

SEQ ID NO: 8092 - protein, 9 aa, SARS coronavirus
KCYGVSATK

SEQ ID NO: 8093 - protein, 9 aa, SARS coronavirus
GIYQTSNFR

SEQ ID NO: 8094 - protein, 9 aa, SARS coronavirus
QLIRAAEIR

SEQ ID NO: 8095 - protein, 9 aa, SARS coronavirus
GVYYPDEIF

SEQ ID NO: 8096 - protein, 9 aa, SARS coronavirus
AAYFVGYLK

SEQ ID NO: 8097 - protein, 9 aa, SARS coronavirus
EVMPVSMAK

SEQ ID NO: 8098 - protein, 9 aa, SARS coronavirus
GLIAIVMVT

SEQ ID NO: 8099 - protein, 9 aa, SARS coronavirus
LIDLQELGK

SEQ ID NO: 8100 - protein, 9 aa, SARS coronavirus
KISNCVADY

SEQ ID NO: 8101 - protein, 10 aa, SARS coronavirus
YLKPTTFMLK

SEQ ID NO: 8102 - protein, 10 aa, SARS coronavirus
HLREFVFKNK

SEQ ID NO: 8103 - protein, 10 aa, SARS coronavirus
QMYKTPTLKY

SEQ ID NO: 8104 - protein, 10 aa, SARS coronavirus
SLIDLQELGK

SEQ ID NO: 8105 - protein, 10 aa, SARS coronavirus
NVYADSFVVK

SEQ ID NO: 8106 - protein, 10 aa, SARS coronavirus
WVFGSTMNNK

SEQ ID NO: 8107 - protein, 10 aa, SARS coronavirus
ILPDPLKPTK

SEQ ID NO: 8108 - protein, 10 aa, SARS coronavirus
CMTSCCSCLK

SEQ ID NO: 8109 - protein, 10 aa, SARS coronavirus
DLPSGFNTLK

SEQ ID NO: 8110 - protein, 10 aa, SARS coronavirus
ELGKYEQYIK

SEQ ID NO: 8111 - protein, 10 aa, SARS coronavirus
GVYYPDEIFR

SEQ ID NO: 8112 - protein, 10 aa, SARS coronavirus
YLTQDLFLPF

SEQ ID NO: 8113 - protein, 10 aa, SARS coronavirus
TLTSGSDLDR

SEQ ID NO: 8114 - protein, 10 aa, SARS coronavirus
SLGADSSIAY

SEQ ID NO: 8115 - protein, 10 aa, SARS coronavirus
HTFGNPVIPF

SEQ ID NO: 8116 - protein, 10 aa, SARS coronavirus
GLIAIVMVTI

SEQ ID NO: 8117 - protein, 10 aa, SARS coronavirus
TLYLTQDLFL

SEQ ID NO: 8118 - protein, 10 aa, SARS coronavirus
TLKYFGGFNF

SEQ ID NO: 8119 - protein, 10 aa, SARS coronavirus
LLTDDMIAAY

SEQ ID NO: 8120 - protein, 10 aa, SARS coronavirus
TLKPIFKLPL

SEQ ID NO: 8121 - protein, 9 aa, SARS coronavirus
VYDPLQPEL

SEQ ID NO: 8122 - protein, 9 aa, SARS coronavirus
LYLTQDLFL

SEQ ID NO: 8123 - protein, 9 aa, SARS coronavirus
EYISDAFSL

SEQ ID NO: 8124 - protein, 9 aa, SARS coronavirus
NYNYKYRYL

SEQ ID NO: 8125 - protein, 9 aa, SARS coronavirus
CYGVSATKL

SEQ ID NO: 8126 - protein, 9 aa, SARS coronavirus
QYGSFCTQL

SEQ ID NO: 8127 - protein, 9 aa, SARS coronavirus
IYSTGNNVF

SEQ ID NO: 8128 - protein, 9 aa, SARS coronavirus
AYFPREGVF

SEQ ID NO: 8129 - protein, 9 aa, SARS coronavirus
QYGECLGDI

SEQ ID NO: 8130 - protein, 9 aa, SARS coronavirus
VYAWERKKI

SEQ ID NO: 8131 - protein, 9 aa, SARS coronavirus
AYSNNTIAI

SEQ ID NO: 8132 - protein, 9 aa, SARS coronavirus
GYLKPTTFM

SEQ ID NO: 8133 - protein, 9 aa, SARS coronavirus
VFQTQAGCL

SEQ ID NO: 8134 - protein, 9 aa, SARS coronavirus
NFGAISSVL

SEQ ID NO: 8135 - protein, 9 aa, SARS coronavirus
NYTQHTSSM

SEQ ID NO: 8136 - protein, 9 aa, SARS coronavirus
NYKLPDDFM

SEQ ID NO: 8137 - protein, 9 aa, SARS coronavirus
TFEYISDAF

SEQ ID NO: 8138 - protein, 9 aa, SARS coronavirus
RLNEVAKNL

SEQ ID NO: 8139 - protein, 9 aa, SARS coronavirus
IFRSDTLYL

SEQ ID NO: 8140 - protein, 9 aa, SARS coronavirus
VFKNKDGFL

SEQ ID NO: 8141 - protein, 10 aa, SARS coronavirus
KYRYLRHGKL

SEQ ID NO: 8142 - protein, 10 aa, SARS coronavirus
GYQPYRVVVL

SEQ ID NO: 8143 - protein, 10 aa, SARS coronavirus
GYLKPTTFML

SEQ ID NO: 8144 - protein, 10 aa, SARS coronavirus
LYNSTFFSTF

SEQ ID NO: 8145 - protein, 10 aa, SARS coronavirus
DYNYKLPDDF

SEQ ID NO: 8146 - protein, 10 aa, SARS coronavirus
TYVPSQERNF

SEQ ID NO: 8147 - protein, 10 aa, SARS coronavirus
CYWPLNDYGF

SEQ ID NO: 8148 - protein, 10 aa, SARS coronavirus
DYSVLYNSTF

SEQ ID NO: 8149 - protein, 10 aa, SARS coronavirus
MYKTPTLKYF

SEQ ID NO: 8150 - protein, 10 aa, SARS coronavirus
LYVYKGYQPI

SEQ ID NO: 8151 - protein, 10 aa, SARS coronavirus
DYGFYTTTGI

SEQ ID NO: 8152 - protein, 10 aa, SARS coronavirus
MFIFLLFLTL

SEQ ID NO: 8153 - protein, 10 aa, SARS coronavirus
GFMKQYGECL

SEQ ID NO: 8154 - protein, 10 aa, SARS coronavirus
SFCTQLNRAL

SEQ ID NO: 8155 - protein, 10 aa, SARS coronavirus
NFSQILPDPL

SEQ ID NO: 8156 - protein, 10 aa, SARS coronavirus
KYEQYIKWPW

SEQ ID NO: 8157 - protein, 10 aa, SARS coronavirus
KAISQIQESL

SEQ ID NO: 8158 - protein, 10 aa, SARS coronavirus
NFELCDNPFF

SEQ ID NO: 8159 - protein, 10 aa, SARS coronavirus
EFVFKNKDGF

SEQ ID NO: 8160 - protein, 10 aa, SARS coronavirus
YFPREGVFVF

SEQ ID NO: 8161 - protein, 9 aa, SARS coronavirus
VVFLHVTYV

SEQ ID NO: 8162 - protein, 9 aa, SARS coronavirus
RLQSLQTYV

SEQ ID NO: 8163 - protein, 9 aa, SARS coronavirus
VLNDILSRL

SEQ ID NO: 8164 - protein, 9 aa, SARS coronavirus
VLYENQKQI

SEQ ID NO: 8165 - protein, 9 aa, SARS coronavirus
NLNESLIDL

SEQ ID NO: 8166 - protein, 9 aa, SARS coronavirus
LLLQYGSFC

SEQ ID NO: 8167 - protein, 9 aa, SARS coronavirus
KLPDDFMGC

SEQ ID NO: 8168 - protein, 9 aa, SARS coronavirus
ILPDPLKPT

SEQ ID NO: 8169 - protein, 9 aa, SARS coronavirus
MIFDNAFNC

SEQ ID NO: 8170 - protein, 9 aa, SARS coronavirus
FIFLLFLTL

SEQ ID NO: 8171 - protein, 9 aa, SARS coronavirus
VLYQDVNCT

SEQ ID NO: 8172 - protein, 9 aa, SARS coronavirus
IITTDNTFV

SEQ ID NO: 8173 - protein, 9 aa, SARS coronavirus
RLNEVAKNL

SEQ ID NO: 8174 - protein, 9 aa, SARS coronavirus
LLTDDMIAA

SEQ ID NO: 8175 - protein, 9 aa, SARS coronavirus
LLQYGSFCT

SEQ ID NO: 8176 - protein, 9 aa, SARS coronavirus
LLFNKVTLA

SEQ ID NO: 8177 - protein, 9 aa, SARS coronavirus
ILLCCMTSC

SEQ ID NO: 8178 - protein, 9 aa, SARS coronavirus
TMNNKSQSV

SEQ ID NO: 8179 - protein, 9 aa, SARS coronavirus
ALNTLVKQL

SEQ ID NO: 8180 - protein, 9 aa, SARS coronavirus
ELCDNPFFA

SEQ ID NO: 8181 - protein, 10 aa, SARS coronavirus
KLNDLCFSNV

SEQ ID NO: 8182 - protein, 10 aa, SARS coronavirus
KLPDDFMGCV

SEQ ID NO: 8183 - protein, 10 aa, SARS coronavirus
YISDAFSLDV

SEQ ID NO: 8184 - protein, 10 aa, SARS coronavirus
FVFNGTSWFI

SEQ ID NO: 8185 - protein, 10 aa, SARS coronavirus
YVWLGFIAGL

SEQ ID NO: 8186 - protein, 10 aa, SARS coronavirus
VLYNSTFFST

SEQ ID NO: 8187 - protein, 10 aa, SARS coronavirus
TLYLTQDLFL

SEQ ID NO: 8188 - protein, 10 aa, SARS coronavirus
LLLQYGSFCT

SEQ ID NO: 8189 - protein, 10 aa, SARS coronavirus
ELCDNPFFAV

SEQ ID NO: 8190 - protein, 10 aa, SARS coronavirus
FMGCVLAWNT

SEQ ID NO: 8191 - protein, 10 aa, SARS coronavirus
GIYQTSNFRV

SEQ ID NO: 8192 - protein, 10 aa, SARS coronavirus
FIFLLFLTLT

SEQ ID NO: 8193 - protein, 10 aa, SARS coronavirus
DLFLPFYSNV

SEQ ID NO: 8194 - protein, 10 aa, SARS coronavirus
NLLLQYGSFC

SEQ ID NO: 8195 - protein, 10 aa, SARS coronavirus
FLTLTSGSDL

SEQ ID NO: 8196 - protein, 10 aa, SARS coronavirus
FMLKYDENGT

SEQ ID NO: 8197 - protein, 10 aa, SARS coronavirus
GVVFLHVTYV

SEQ ID NO: 8198 - protein, 10 aa, SARS coronavirus
KLQDVVNQNA

SEQ ID NO: 8199 - protein, 10 aa, SARS coronavirus
EQYIKWPWYV

SEQ ID NO: 8200 - protein, 10 aa, SARS coronavirus
QIITTDNTFV

SEQ ID NO: 8201 - protein, 9 aa, SARS coronavirus
GVIADYNYK

SEQ ID NO: 8202 - protein, 9 aa, SARS coronavirus
KQIANQFNK

SEQ ID NO: 8203 - protein, 9 aa, SARS coronavirus
SVKSFEIDK

SEQ ID NO: 8204 - protein, 9 aa, SARS coronavirus
GIYFAATEK

SEQ ID NO: 8205 - protein, 9 aa, SARS coronavirus
EVMPVSMAK

SEQ ID NO: 8206 - protein, 9 aa, SARS coronavirus
NVPFSPDGK

SEQ ID NO: 8207 - protein, 9 aa, SARS coronavirus
TTTSTALGK

SEQ ID NO: 8208 - protein, 9 aa, SARS coronavirus
GVLTPSSKR

SEQ ID NO: 8209 - protein, 9 aa, SARS coronavirus
KCYGVSATK

SEQ ID NO: 8210 - protein, 9 aa, SARS coronavirus
KYRYLRHGK

SEQ ID NO: 8211 - protein, 9 aa, SARS coronavirus
FIEDLLFNK

SEQ ID NO: 8212 - protein, 9 aa, SARS coronavirus
TLADAGFMK

SEQ ID NO: 8213 - protein, 9 aa, SARS coronavirus
AQALNTLVK

SEQ ID NO: 8214 - protein, 9 aa, SARS coronavirus
SVLNDILSR

SEQ ID NO: 8215 - protein, 9 aa, SARS coronavirus
FTDSVRDPK

SEQ ID NO: 8216 - protein, 9 aa, SARS coronavirus
MTSCCSCLK

SEQ ID NO: 8217 - protein, 9 aa, SARS coronavirus
SQILPDPLK

SEQ ID NO: 8218 - protein, 9 aa, SARS coronavirus
AAYFVGYLK

SEQ ID NO: 8219 - protein, 9 aa, SARS coronavirus
QMYKTPTLK

SEQ ID NO: 8220 - protein, 9 aa, SARS coronavirus
LIDLQELGK

SEQ ID NO: 8221 - protein, 10 aa, SARS coronavirus
GVYYPDEIFR

SEQ ID NO: 8222 - protein, 10 aa, SARS coronavirus
VTLADAGFMK

SEQ ID NO: 8223 - protein, 10 aa, SARS coronavirus
WVFGSTMNNK

SEQ ID NO: 8224 - protein, 10 aa, SARS coronavirus
NVYADSFVVK

SEQ ID NO: 8225 - protein, 10 aa, SARS coronavirus
KQMYKTPTLK

SEQ ID NO: 8226 - protein, 10 aa, SARS coronavirus
GTGVLTPSSK

SEQ ID NO: 8227 - protein, 10 aa, SARS coronavirus
KVEAEVQIDR

SEQ ID NO: 8228 - protein, 10 aa, SARS coronavirus
LTTTSTALGK

SEQ ID NO: 8229 - protein, 10 aa, SARS coronavirus
RVVPSGDVVR

SEQ ID NO: 8230 - protein, 10 aa, SARS coronavirus
GFNTLKPIFK

SEQ ID NO: 8231 - protein, 10 aa, SARS coronavirus
GPKLSTDLIK

SEQ ID NO: 8232 - protein, 10 aa, SARS coronavirus
SLIDLQELGK

SEQ ID NO: 8233 - protein, 10 aa, SARS coronavirus
ATSTGNYNYK

SEQ ID NO: 8234 - protein, 10 aa, SARS coronavirus
NTREVFAQVK

SEQ ID NO: 8235 - protein, 10 aa, SARS coronavirus
SFIEDLLFNK

SEQ ID NO: 8236 - protein, 10 aa, SARS coronavirus
YLKPTTFMLK

SEQ ID NO: 8237 - protein, 10 aa, SARS coronavirus
QTYVTQQLIR

SEQ ID NO: 8238 - protein, 10 aa, SARS coronavirus
VVNIQKEIDR

SEQ ID NO: 8239 - protein, 10 aa, SARS coronavirus
DVSEKSGNFK

SEQ ID NO: 8240 - protein, 10 aa, SARS coronavirus
TQNVLYENQK

SEQ ID NO: 8241 - protein, 9 aa, SARS coronavirus
QPIDVVRDL

SEQ ID NO: 8242 - protein, 9 aa, SARS coronavirus
EPVLKGVKL

SEQ ID NO: 8243 - protein, 9 aa, SARS coronavirus
VIRACNFEL

SEQ ID NO: 8244 - protein, 9 aa, SARS coronavirus
AAAYFVGYL

SEQ ID NO: 8245 - protein, 9 aa, SARS coronavirus
AAPHGVVFL

SEQ ID NO: 8246 - protein, 9 aa, SARS coronavirus
RVVVLSFEL

SEQ ID NO: 8247 - protein, 9 aa, SARS coronavirus
VVVLSFELL

SEQ ID NO: 8248 - protein, 9 aa, SARS coronavirus
CVNFNFNGL

SEQ ID NO: 8249 - protein, 9 aa, SARS coronavirus
LPPLLTDDM

SEQ ID NO: 8250 - protein, 9 aa, SARS coronavirus
VVNQNAQAL

SEQ ID NO: 8251 - protein, 9 aa, SARS coronavirus
AVDCSQNPL

SEQ ID NO: 8252 - protein, 9 aa, SARS coronavirus
NASSEVAVL

SEQ ID NO: 8253 - protein, 9 aa, SARS coronavirus
CASYHTVSL

SEQ ID NO: 8254 - protein, 9 aa, SARS coronavirus
ASYHTVSLL

SEQ ID NO: 8255 - protein, 9 aa, SARS coronavirus
KQMYKTPTL

SEQ ID NO: 8256 - protein, 9 aa, SARS coronavirus
AISQIQESL

SEQ ID NO: 8257 - protein, 9 aa, SARS coronavirus
ALNTLVKQL

SEQ ID NO: 8258 - protein, 9 aa, SARS coronavirus
ATKMSECVL

SEQ ID NO: 8259 - protein, 9 aa, SARS coronavirus
VAKNLNESL

SEQ ID NO: 8260 - protein, 9 aa, SARS coronavirus
IAIVMVTIL

SEQ ID NO: 8261 - protein, 10 aa, SARS coronavirus
APATVCGPKL

SEQ ID NO: 8262 - protein, 10 aa, SARS coronavirus
VVRFPNITNL

SEQ ID NO: 8263 - protein, 10 aa, SARS coronavirus
KPMGTQTHTM

SEQ ID NO: 8264 - protein, 10 aa, SARS coronavirus
AATKMSECVL

SEQ ID NO: 8265 - protein, 10 aa, SARS coronavirus
LPDDFMGCVL

SEQ ID NO: 8266 - protein, 10 aa, SARS coronavirus
VVIRACNFEL

SEQ ID NO: 8267 - protein, 10 aa, SARS coronavirus
NPFFAVSKPM

SEQ ID NO: 8268 - protein, 10 aa, SARS coronavirus
FVFKNKDGFL

SEQ ID NO: 8269 - protein, 10 aa, SARS coronavirus
GVSATKLNDL

SEQ ID NO: 8270 - protein, 10 aa, SARS coronavirus
GVIADYNYKL

SEQ ID NO: 8271 - protein, 10 aa, SARS coronavirus
RVVVLSFELL

SEQ ID NO: 8272 - protein, 10 aa, SARS coronavirus
SVRDPKTSEI

SEQ ID NO: 8273 - protein, 10 aa, SARS coronavirus
NVFQTQAGCL

SEQ ID NO: 8274 - protein, 10 aa, SARS coronavirus
DVVNQNAQAL

SEQ ID NO: 8275 - protein, 10 aa, SARS coronavirus
SVLNDILSRL

SEQ ID NO: 8276 - protein, 10 aa, SARS coronavirus
TVYDPLQPEL

SEQ ID NO: 8277 - protein, 10 aa, SARS coronavirus
EVAKNLNESL

SEQ ID NO: 8278 - protein, 10 aa, SARS coronavirus
YVWLGFIAGL

SEQ ID NO: 8279 - protein, 10 aa, SARS coronavirus
SAAAYFVGYL

SEQ ID NO: 8280 - protein, 10 aa, SARS coronavirus
DAVDCSQNPL

SEQ ID NO: 8281 - protein, 9 aa, SARS coronavirus
VTEGDGIST

SEQ ID NO: 8282 - protein, 9 aa, SARS coronavirus
QLESTQITT

SEQ ID NO: 8283 - protein, 9 aa, SARS coronavirus
GIENATFFI

SEQ ID NO: 8284 - protein, 9 aa, SARS coronavirus
FLYLYALIY

SEQ ID NO: 8285 - protein, 9 aa, SARS coronavirus
EGDGISTPK

SEQ ID NO: 8286 - protein, 9 aa, SARS coronavirus
GMEAQFLYL

SEQ ID NO: 8287 - protein, 9 aa, SARS coronavirus
YSEDRHSGV

SEQ ID NO: 8288 - protein, 9 aa, SARS coronavirus
KEDYQIGGY

SEQ ID NO: 8289 - protein, 9 aa, SARS coronavirus
TTDTGIENA

SEQ ID NO: 8290 - protein, 9 aa, SARS coronavirus
KIDNASPAS

SEQ ID NO: 8291 - protein, 9 aa, SARS coronavirus
NATFFIFNK

SEQ ID NO: 8292 - protein, 9 aa, SARS coronavirus
AGMEAQFLY

SEQ ID NO: 8293 - protein, 9 aa, SARS coronavirus
HNYDYCIPY

SEQ ID NO: 8294 - protein, 9 aa, SARS coronavirus
GSITAQPVK

SEQ ID NO: 8295 - protein, 9 aa, SARS coronavirus
TAQPVKIDN

SEQ ID NO: 8296 - protein, 9 aa, SARS coronavirus
ATIPLQASL

SEQ ID NO: 8297 - protein, 9 aa, SARS coronavirus
LALYKGFQF

SEQ ID NO: 8298 - protein, 9 aa, SARS coronavirus
FICNLLLLF

SEQ ID NO: 8299 - protein, 9 aa, SARS coronavirus
LLLLFVTIY

SEQ ID NO: 8300 - protein, 9 aa, SARS coronavirus
FVCWHTHNY

SEQ ID NO: 8301 - protein, 10 aa, SARS coronavirus
GMEAQFLYLY

SEQ ID NO: 8302 - protein, 10 aa, SARS coronavirus
GIENATFFIF

SEQ ID NO: 8303 - protein, 10 aa, SARS coronavirus
YSEDRHSGVK

SEQ ID NO: 8304 - protein, 10 aa, SARS coronavirus
FTEVYYQLES

SEQ ID NO: 8305 - protein, 10 aa, SARS coronavirus
VANPAMDPIY

SEQ ID NO: 8306 - protein, 10 aa, SARS coronavirus
ISTPKLKEDY

SEQ ID NO: 8307 - protein, 10 aa, SARS coronavirus
AAGMEAQFLY

SEQ ID NO: 8308 - protein, 10 aa, SARS coronavirus
AMDPIYDEPT

SEQ ID NO: 8309 - protein, 10 aa, SARS coronavirus
LKEDYQIGGY

SEQ ID NO: 8310 - protein, 10 aa, SARS coronavirus
VTDTIVVTEG

SEQ ID NO: 8311 - protein, 10 aa, SARS coronavirus
VKDYVVVHGY

SEQ ID NO: 8312 - protein, 10 aa, SARS coronavirus
TTDTGIENAT

SEQ ID NO: 8313 - protein, 10 aa, SARS coronavirus
KIDNASPAST

SEQ ID NO: 8314 - protein, 10 aa, SARS coronavirus
TIDGSSGVAN

SEQ ID NO: 8315 - protein, 10 aa, SARS coronavirus
ASLPFGWLVI

SEQ ID NO: 8316 - protein, 10 aa, SARS coronavirus
TIPLQASLPF

SEQ ID NO: 8317 - protein, 10 aa, SARS coronavirus
QLALYKGFQF

SEQ ID NO: 8318 - protein, 10 aa, SARS coronavirus
NLLLLFVTIY

SEQ ID NO: 8319 - protein, 10 aa, SARS coronavirus
FLYLYALIYF

SEQ ID NO: 8320 - protein, 10 aa, SARS coronavirus
CINACRIIMR

SEQ ID NO: 8321 - protein, 9 aa, SARS coronavirus
FLYLYALIY

SEQ ID NO: 8322 - protein, 9 aa, SARS coronavirus
IMRCWLCWK

SEQ ID NO: 8323 - protein, 9 aa, SARS coronavirus
LLLLFVTIY

SEQ ID NO: 8324 - protein, 9 aa, SARS coronavirus
YLYALIYFL

SEQ ID NO: 8325 - protein, 9 aa, SARS coronavirus
GMEAQFLYL

SEQ ID NO: 8326 - protein, 9 aa, SARS coronavirus
WLCWKCKSK

SEQ ID NO: 8327 - protein, 9 aa, SARS coronavirus
ALYKGFQFI

SEQ ID NO: 8328 - protein, 9 aa, SARS coronavirus
DLFMRFFTL

SEQ ID NO: 8329 - protein, 9 aa, SARS coronavirus
FLQCINACR

SEQ ID NO: 8330 - protein, 9 aa, SARS coronavirus
LLFVTIYSH

SEQ ID NO: 8331 - protein, 9 aa, SARS coronavirus
ALIYFLQCI

SEQ ID NO: 8332 - protein, 9 aa, SARS coronavirus
ATKIIALNK

SEQ ID NO: 8333 - protein, 9 aa, SARS coronavirus
LLYDANYFV

SEQ ID NO: 8334 - protein, 9 aa, SARS coronavirus
WLVIGVAFL

SEQ ID NO: 8335 - protein, 9 aa, SARS coronavirus
NLLLLFVTI

SEQ ID NO: 8336 - protein, 9 aa, SARS coronavirus
NATFFIFNK

SEQ ID NO: 8337 - protein, 9 aa, SARS coronavirus
QIGGYSEDR

SEQ ID NO: 8338 - protein, 9 aa, SARS coronavirus
AQFLYLYAL

SEQ ID NO: 8339 - protein, 9 aa, SARS coronavirus
SLPFGWLVI

SEQ ID NO: 8340 - protein, 9 aa, SARS coronavirus
KLVKDPPNV

SEQ ID NO: 8341 - protein, 10 aa, SARS coronavirus
GMEAQFLYLY

SEQ ID NO: 8342 - protein, 10 aa, SARS coronavirus
NLLLLFVTIY

SEQ ID NO: 8343 - protein, 10 aa, SARS coronavirus
FLYLYALIYF

SEQ ID NO: 8344 - protein, 10 aa, SARS coronavirus
FLAVFQSATK

SEQ ID NO: 8345 - protein, 10 aa, SARS coronavirus
IIMRCWLCWK

SEQ ID NO: 8346 - protein, 10 aa, SARS coronavirus
ALYKGFQFIC

SEQ ID NO: 8347 - protein, 10 aa, SARS coronavirus
QLALYKGFQF

SEQ ID NO: 8348 - protein, 10 aa, SARS coronavirus
GIENATFFIF

SEQ ID NO: 8349 - protein, 10 aa, SARS coronavirus
LLFVTIYSHL

SEQ ID NO: 8350 - protein, 10 aa, SARS coronavirus
ALNKRWQLAL

SEQ ID NO: 8351 - protein, 10 aa, SARS coronavirus
LLYDANYFVC

SEQ ID NO: 8352 - protein, 10 aa, SARS coronavirus
VVHGYFTEVY

SEQ ID NO: 8353 - protein, 10 aa, SARS coronavirus
WLVIGVAFLA

SEQ ID NO: 8354 - protein, 10 aa, SARS coronavirus
LLLFVTIYSH

SEQ ID NO: 8355 - protein, 10 aa, SARS coronavirus
CINACRIIMR

SEQ ID NO: 8356 - protein, 10 aa, SARS coronavirus
VIGVAFLAVF

SEQ ID NO: 8357 - protein, 10 aa, SARS coronavirus
YQIGGYSEDR

SEQ ID NO: 8358 - protein, 10 aa, SARS coronavirus
SATKIIALNK

SEQ ID NO: 8359 - protein, 10 aa, SARS coronavirus
LLLVAAGMEA

SEQ ID NO: 8360 - protein, 10 aa, SARS coronavirus
FLQCINACRI

SEQ ID NO: 8361 - protein, 9 aa, SARS coronavirus
DYVVVHGYF

SEQ ID NO: 8362 - protein, 9 aa, SARS coronavirus
LYLYALIYF

SEQ ID NO: 8363 - protein, 9 aa, SARS coronavirus
YYQLESTQI

SEQ ID NO: 8364 - protein, 9 aa, SARS coronavirus
GFQFICNLL

SEQ ID NO: 8365 - protein, 9 aa, SARS coronavirus
LFVTIYSHL

SEQ ID NO: 8366 - protein, 9 aa, SARS coronavirus
YFTEVYYQL

SEQ ID NO: 8367 - protein, 9 aa, SARS coronavirus
QFICNLLLL

SEQ ID NO: 8368 - protein, 9 aa, SARS coronavirus
PYNSVTDTI

SEQ ID NO: 8369 - protein, 9 aa, SARS coronavirus
QFLYLYALI

SEQ ID NO: 8370 - protein, 9 aa, SARS coronavirus
ATFFIFNKL

SEQ ID NO: 8371 - protein, 9 aa, SARS coronavirus
ATIPLQASL

SEQ ID NO: 8372 - protein, 9 aa, SARS coronavirus
KGFQFICNL

SEQ ID NO: 8373 - protein, 9 aa, SARS coronavirus
KCKSKNPLL

SEQ ID NO: 8374 - protein, 9 aa, SARS coronavirus
VFQSATKII

SEQ ID NO: 8375 - protein, 9 aa, SARS coronavirus
GMEAQFLYL

SEQ ID NO: 8376 - protein, 9 aa, SARS coronavirus
WLVIGVAFL

SEQ ID NO: 8377 - protein, 9 aa, SARS coronavirus
IALNKRWQL

SEQ ID NO: 8378 - protein, 9 aa, SARS coronavirus
VTIYSHLLL

SEQ ID NO: 8379 - protein, 9 aa, SARS coronavirus
IYSHLLLVA

SEQ ID NO: 8380 - protein, 9 aa, SARS coronavirus
DYCIPYNSV

SEQ ID NO: 8381 - protein, 10 aa, SARS coronavirus
LYLYALIYFL

SEQ ID NO: 8382 - protein, 10 aa, SARS coronavirus
GYFTEVYYQL

SEQ ID NO: 8383 - protein, 10 aa, SARS coronavirus
VYYQLESTQI

SEQ ID NO: 8384 - protein, 10 aa, SARS coronavirus
GFQFICNLLL

SEQ ID NO: 8385 - protein, 10 aa, SARS coronavirus
LFVTIYSHLL

SEQ ID NO: 8386 - protein, 10 aa, SARS coronavirus
QFICNLLLLF

SEQ ID NO: 8387 - protein, 10 aa, SARS coronavirus
KGFQFICNLL

SEQ ID NO: 8388 - protein, 10 aa, SARS coronavirus
YYQLESTQIT

SEQ ID NO: 8389 - protein, 10 aa, SARS coronavirus
NATFFIFNKL

SEQ ID NO: 8390 - protein, 10 aa, SARS coronavirus
AGMEAQFLYL

SEQ ID NO: 8391 - protein, 10 aa, SARS coronavirus
DYVVVHGYFT

SEQ ID NO: 8392 - protein, 10 aa, SARS coronavirus
RWQLALYKGF

SEQ ID NO: 8393 - protein, 10 aa, SARS coronavirus
NYDYCIPYNS

SEQ ID NO: 8394 - protein, 10 aa, SARS coronavirus
GWLVIGVAFL

SEQ ID NO: 8395 - protein, 10 aa, SARS coronavirus
ALNKRWQLAL

SEQ ID NO: 8396 - protein, 10 aa, SARS coronavirus
LYKGFQFICN

SEQ ID NO: 8397 - protein, 10 aa, SARS coronavirus
IYSHLLLVAA

SEQ ID NO: 8398 - protein, 10 aa, SARS coronavirus
EAQFLYLYAL

SEQ ID NO: 8399 - protein, 10 aa, SARS coronavirus
LYALIYFLQC

SEQ ID NO: 8400 - protein, 10 aa, SARS coronavirus
IYFLQCINAC

SEQ ID NO: 8401 - protein, 9 aa, SARS coronavirus
LLYDANYFV

SEQ ID NO: 8402 - protein, 9 aa, SARS coronavirus
YLYALIYFL

SEQ ID NO: 8403 - protein, 9 aa, SARS coronavirus
WLVIGVAFL

SEQ ID NO: 8404 - protein, 9 aa, SARS coronavirus
ALYKGFQFI

SEQ ID NO: 8405 - protein, 9 aa, SARS coronavirus
KLVKDPPNV

SEQ ID NO: 8406 - protein, 9 aa, SARS coronavirus
FLAVFQSAT

SEQ ID NO: 8407 - protein, 9 aa, SARS coronavirus
ALIYFLQCI

SEQ ID NO: 8408 - protein, 9 aa, SARS coronavirus
NLLLLFVTI

SEQ ID NO: 8409 - protein, 9 aa, SARS coronavirus
TIYSHLLLV

SEQ ID NO: 8410 - protein, 9 aa, SARS coronavirus
DLFMRFFTL

SEQ ID NO: 8411 - protein, 9 aa, SARS coronavirus
ASLPFGWLV

SEQ ID NO: 8412 - protein, 9 aa, SARS coronavirus
FQFICNLLL

SEQ ID NO: 8413 - protein, 9 aa, SARS coronavirus
VIGVAFLAV

SEQ ID NO: 8414 - protein, 9 aa, SARS coronavirus
YQLESTQIT

SEQ ID NO: 8415 - protein, 9 aa, SARS coronavirus
VVHGYFTEV

SEQ ID NO: 8416 - protein, 9 aa, SARS coronavirus
AQFLYLYAL

SEQ ID NO: 8417 - protein, 9 aa, SARS coronavirus
YVVVHGYFT

SEQ ID NO: 8418 - protein, 9 aa, SARS coronavirus
KGFQFICNL

SEQ ID NO: 8419 - protein, 9 aa, SARS coronavirus
IALNKRWQL

SEQ ID NO: 8420 - protein, 9 aa, SARS coronavirus
GMEAQFLYL

SEQ ID NO: 8421 - protein, 10 aa, SARS coronavirus
FICNLLLLFV

SEQ ID NO: 8422 - protein, 10 aa, SARS coronavirus
LLYDANYFVC

SEQ ID NO: 8423 - protein, 10 aa, SARS coronavirus
LLFVTIYSHL

SEQ ID NO: 8424 - protein, 10 aa, SARS coronavirus
ALYKGFQFIC

SEQ ID NO: 8425 - protein, 10 aa, SARS coronavirus
WLVIGVAFLA

SEQ ID NO: 8426 - protein, 10 aa, SARS coronavirus
FQFICNLLLL

SEQ ID NO: 8427 - protein, 10 aa, SARS coronavirus
TLGSITAQPV

SEQ ID NO: 8428 - protein, 10 aa, SARS coronavirus
YQLESTQITT

SEQ ID NO: 8429 - protein, 10 aa, SARS coronavirus
FLQCINACRI

SEQ ID NO: 8430 - protein, 10 aa, SARS coronavirus
IIALNKRWQL

SEQ ID NO: 8431 - protein, 10 aa, SARS coronavirus
LLLVAAGMEA

SEQ ID NO: 8432 - protein, 10 aa, SARS coronavirus
PLLYDANYFV

SEQ ID NO: 8433 - protein, 10 aa, SARS coronavirus
QASLPFGWLV

SEQ ID NO: 8434 - protein, 10 aa, SARS coronavirus
FQSATKIIAL

SEQ ID NO: 8435 - protein, 10 aa, SARS coronavirus
AGMEAQFLYL

SEQ ID NO: 8436 - protein, 10 aa, SARS coronavirus
YALIYFLQCI

SEQ ID NO: 8437 - protein, 10 aa, SARS coronavirus
ALNKRWQLAL

SEQ ID NO: 8438 - protein, 10 aa, SARS coronavirus
LVIGVAFLAV

SEQ ID NO: 8439 - protein, 10 aa, SARS coronavirus
VVVHGYFTEV

SEQ ID NO: 8440 - protein, 10 aa, SARS coronavirus
FLYLYALIYF

SEQ ID NO: 8441 - protein, 9 aa, SARS coronavirus
ATKIIALNK

SEQ ID NO: 8442 - protein, 9 aa, SARS coronavirus
RCWLCWKCK

SEQ ID NO: 8443 - protein, 9 aa, SARS coronavirus
NATFFIFNK

SEQ ID NO: 8444 - protein, 9 aa, SARS coronavirus
FFIFNKLVK

SEQ ID NO: 8445 - protein, 10 aa, SARS coronavirus
IIMRCWLCWK

SEQ ID NO: 8446 - protein, 10 aa, SARS coronavirus
TFFIFNKLVK

SEQ ID NO: 8447 - protein, 9 aa, SARS coronavirus
AAGMEAQFL

SEQ ID NO: 8448 - protein, 9 aa, SARS coronavirus
FVTIYSHLL

SEQ ID NO: 8449 - protein, 9 aa, SARS coronavirus
QASLPFGWL

SEQ ID NO: 8450 - protein, 9 aa, SARS coronavirus
IALNKRWQL

SEQ ID NO: 8451 - protein, 9 aa, SARS coronavirus
ATIPLQASL

SEQ ID NO: 8452 - protein, 9 aa, SARS coronavirus
AQFLYLYAL

SEQ ID NO: 8453 - protein, 9 aa, SARS coronavirus
ATFFIFNKL

SEQ ID NO: 8454 - protein, 9 aa, SARS coronavirus
AVFQSATKI

SEQ ID NO: 8455 - protein, 9 aa, SARS coronavirus
DLFMRFFTL

SEQ ID NO: 8456 - protein, 9 aa, SARS coronavirus
WLVIGVAFL

SEQ ID NO: 8457 - protein, 9 aa, SARS coronavirus
QSATKIIAL

SEQ ID NO: 8458 - protein, 9 aa, SARS coronavirus
LNKRWQLAL

SEQ ID NO: 8459 - protein, 9 aa, SARS coronavirus
KGFQFICNL

SEQ ID NO: 8460 - protein, 9 aa, SARS coronavirus
FQFICNLLL

SEQ ID NO: 8461 - protein, 9 aa, SARS coronavirus
VTIYSHLLL

SEQ ID NO: 8462 - protein, 9 aa, SARS coronavirus
YLYALIYFL

SEQ ID NO: 8463 - protein, 9 aa, SARS coronavirus
KCKSKNPLL

SEQ ID NO: 8464 - protein, 9 aa, SARS coronavirus
SPASTVHAT

SEQ ID NO: 8465 - protein, 9 aa, SARS coronavirus
IPYNSVTDT

SEQ ID NO: 8466 - protein, 9 aa, SARS coronavirus
IVVTEGDGI

SEQ ID NO: 8467 - protein, 10 aa, SARS coronavirus
ACRIIMRCWL

SEQ ID NO: 8468 - protein, 10 aa, SARS coronavirus
EPTTTTSVPL

SEQ ID NO: 8469 - protein, 10 aa, SARS coronavirus
AGMEAQFLYL

SEQ ID NO: 8470 - protein, 10 aa, SARS coronavirus
TVHATATIPL

SEQ ID NO: 8471 - protein, 10 aa, SARS coronavirus
FVTIYSHLLL

SEQ ID NO: 8472 - protein, 10 aa, SARS coronavirus
TATIPLQASL

SEQ ID NO: 8473 - protein, 10 aa, SARS coronavirus
ALNKRWQLAL

SEQ ID NO: 8474 - protein, 10 aa, SARS coronavirus
VAAGMEAQFL

SEQ ID NO: 8475 - protein, 10 aa, SARS coronavirus
EAQFLYLYAL

SEQ ID NO: 8476 - protein, 10 aa, SARS coronavirus
NATFFIFNKL

SEQ ID NO: 8477 - protein, 10 aa, SARS coronavirus
IPYNSVTDTI

SEQ ID NO: 8478 - protein, 10 aa, SARS coronavirus
TPKLKEDYQI

SEQ ID NO: 8479 - protein, 10 aa, SARS coronavirus
DPPNVQIHTI

SEQ ID NO: 8480 - protein, 10 aa, SARS coronavirus
LQASLPFGWL

SEQ ID NO: 8481 - protein, 10 aa, SARS coronavirus
AVFQSATKII

SEQ ID NO: 8482 - protein, 10 aa, SARS coronavirus
IIALNKRWQL

SEQ ID NO: 8483 - protein, 10 aa, SARS coronavirus
FMRFFTLGSI

SEQ ID NO: 8484 - protein, 10 aa, SARS coronavirus
LPFGWLVIGV

SEQ ID NO: 8485 - protein, 10 aa, SARS coronavirus
FQSATKIIAL

SEQ ID NO: 8486 - protein, 10 aa, SARS coronavirus
KGFQFICNLL

SEQ ID NO: 8487 - protein, 9 aa, SARS coronavirus
FTTSLSLHK

SEQ ID NO: 8488 - protein, 9 aa, SARS coronavirus
SSSLTSLLK

SEQ ID NO: 8489 - protein, 9 aa, SARS coronavirus
NLCTHSFRK

SEQ ID NO: 8490 - protein, 9 aa, SARS coronavirus
LLIQQWIQF

SEQ ID NO: 8491 - protein, 10 aa, SARS coronavirus
VSQIQLSLLK

SEQ ID NO: 8492 - protein, 10 aa, SARS coronavirus
HSSSLTSLLK

SEQ ID NO: 8493 - protein, 10 aa, SARS coronavirus
GTHITMTTVY

SEQ ID NO: 8494 - protein, 10 aa, SARS coronavirus
VTAFQHQNSK

SEQ ID NO: 8495 - protein, 10 aa, SARS coronavirus
ELLIQQWIQF

SEQ ID NO: 8496 - protein, 9 aa, SARS coronavirus
SLYMAISPK

SEQ ID NO: 8497 - protein, 9 aa, SARS coronavirus
KLLQTLVLK

SEQ ID NO: 8498 - protein, 9 aa, SARS coronavirus
NLCTHSFRK

SEQ ID NO: 8499 - protein, 9 aa, SARS coronavirus
LLKTHRMCK

SEQ ID NO: 8500 - protein, 9 aa, SARS coronavirus
LLACLCKHK

SEQ ID NO: 8501 - protein, 9 aa, SARS coronavirus
LLIQQWIQF

SEQ ID NO: 8502 - protein, 9 aa, SARS coronavirus
FTTSLSLHK

SEQ ID NO: 8503 - protein, 9 aa, SARS coronavirus
SQIQLSLLK

SEQ ID NO: 8504 - protein, 9 aa, SARS coronavirus
TTKLVVILR

SEQ ID NO: 8505 - protein, 9 aa, SARS coronavirus
LLQTLVLKM

SEQ ID NO: 8506 - protein, 9 aa, SARS coronavirus
TAFQHQNSK

SEQ ID NO: 8507 - protein, 9 aa, SARS coronavirus
QVLKTMSLY

SEQ ID NO: 8508 - protein, 9 aa, SARS coronavirus
SLHKLLQTL

SEQ ID NO: 8509 - protein, 9 aa, SARS coronavirus
LLKVTAFQH

SEQ ID NO: 8510 - protein, 9 aa, SARS coronavirus
HQNSKKTTK

SEQ ID NO: 8511 - protein, 9 aa, SARS coronavirus
ILRIGTQVL

SEQ ID NO: 8512 - protein, 9 aa, SARS coronavirus
WIQFMMSRR

SEQ ID NO: 8513 - protein, 9 aa, SARS coronavirus
TLFAGTHIT

SEQ ID NO: 8514 - protein, 10 aa, SARS coronavirus
SLLKTHRMCK

SEQ ID NO: 8515 - protein, 10 aa, SARS coronavirus
ILRIGTQVLK

SEQ ID NO: 8516 - protein, 10 aa, SARS coronavirus
LLACLCKHKK

SEQ ID NO: 8517 - protein, 10 aa, SARS coronavirus
SLYMAISPKF

SEQ ID NO: 8518 - protein, 10 aa, SARS coronavirus
RLLACLCKHK

SEQ ID NO: 8519 - protein, 10 aa, SARS coronavirus
QLSLLKVTAF

SEQ ID NO: 8520 - protein, 10 aa, SARS coronavirus
LLKTHRMCKY

SEQ ID NO: 8521 - protein, 10 aa, SARS coronavirus
NLCTHSFRKK

SEQ ID NO: 8522 - protein, 10 aa, SARS coronavirus
KTTKLVVILR

SEQ ID NO: 8523 - protein, 10 aa, SARS coronavirus
KLLQTLVLKM

SEQ ID NO: 8524 - protein, 10 aa, SARS coronavirus
QQWIQFMMSR

SEQ ID NO: 8525 - protein, 10 aa, SARS coronavirus
SLTSLLKTHR

SEQ ID NO: 8526 - protein, 10 aa, SARS coronavirus
TLFAGTHITM

SEQ ID NO: 8527 - protein, 10 aa, SARS coronavirus
ELLIQQWIQF

SEQ ID NO: 8528 - protein, 10 aa, SARS coronavirus
LLIQQWIQFM

SEQ ID NO: 8529 - protein, 10 aa, SARS coronavirus
TMTTVYHITV

SEQ ID NO: 8530 - protein, 10 aa, SARS coronavirus
VTAFQHQNSK

SEQ ID NO: 8531 - protein, 10 aa, SARS coronavirus
TAFQHQNSKK

SEQ ID NO: 8532 - protein, 10 aa, SARS coronavirus
TVYHITVSQI

SEQ ID NO: 8533 - protein, 10 aa, SARS coronavirus
SLLKVTAFQH

SEQ ID NO: 8534 - protein, 9 aa, SARS coronavirus
LYMAISPKF

SEQ ID NO: 8535 - protein, 9 aa, SARS coronavirus
VYHITVSQI

SEQ ID NO: 8536 - protein, 9 aa, SARS coronavirus
QFMMSRRRL

SEQ ID NO: 8537 - protein, 9 aa, SARS coronavirus
KTTKLVVIL

SEQ ID NO: 8538 - protein, 9 aa, SARS coronavirus
TSLSLHKLL

SEQ ID NO: 8539 - protein, 9 aa, SARS coronavirus
VSQIQLSLL

SEQ ID NO: 8540 - protein, 9 aa, SARS coronavirus
TQVLKTMSL

SEQ ID NO: 8541 - protein, 9 aa, SARS coronavirus
ISPKFTTSL

SEQ ID NO: 8542 - protein, 9 aa, SARS coronavirus
FMMSRRRLL

SEQ ID NO: 8543 - protein, 9 aa, SARS coronavirus
SLHKLLQTL

SEQ ID NO: 8544 - protein, 9 aa, SARS coronavirus
TVSQIQLSL

SEQ ID NO: 8545 - protein, 9 aa, SARS coronavirus
LQTLVLKML

SEQ ID NO: 8546 - protein, 9 aa, SARS coronavirus
TQSTALQEL

SEQ ID NO: 8547 - protein, 9 aa, SARS coronavirus
ILRIGTQVL

SEQ ID NO: 8548 - protein, 9 aa, SARS coronavirus
HSSSLTSLL

SEQ ID NO: 8549 - protein, 9 aa, SARS coronavirus
QSTALQELL

SEQ ID NO: 8550 - protein, 9 aa, SARS coronavirus
QNSKKTTKL

SEQ ID NO: 8551 - protein, 9 aa, SARS coronavirus
TTSLSLHKL

SEQ ID NO: 8552 - protein, 9 aa, SARS coronavirus
HITVSQIQL

SEQ ID NO: 8553 - protein, 9 aa, SARS coronavirus
KTMSLYMAI

SEQ ID NO: 8554 - protein, 10 aa, SARS coronavirus
QFMMSRRRLL

SEQ ID NO: 8555 - protein, 10 aa, SARS coronavirus
LSLHKLLQTL

SEQ ID NO: 8556 - protein, 10 aa, SARS coronavirus
ITVSQIQLSL

SEQ ID NO: 8557 - protein, 10 aa, SARS coronavirus
LLQTLVLKML

SEQ ID NO: 8558 - protein, 10 aa, SARS coronavirus
YTQSTALQEL

SEQ ID NO: 8559 - protein, 10 aa, SARS coronavirus
LYMAISPKFT

SEQ ID NO: 8560 - protein, 10 aa, SARS coronavirus
VILRIGTQVL

SEQ ID NO: 8561 - protein, 10 aa, SARS coronavirus
HQNSKKTTKL

SEQ ID NO: 8562 - protein, 10 aa, SARS coronavirus
GTQVLKTMSL

SEQ ID NO: 8563 - protein, 10 aa, SARS coronavirus
AISPKFTTSL

SEQ ID NO: 8564 - protein, 10 aa, SARS coronavirus
TTSLSLHKLL

SEQ ID NO: 8565 - protein, 10 aa, SARS coronavirus
TQSTALQELL

SEQ ID NO: 8566 - protein, 10 aa, SARS coronavirus
MSRRRLLACL

SEQ ID NO: 8567 - protein, 10 aa, SARS coronavirus
FTTSLSLHKL

SEQ ID NO: 8568 - protein, 10 aa, SARS coronavirus
TVSQIQLSLL

SEQ ID NO: 8569 - protein, 10 aa, SARS coronavirus
SPKFTTSLSL

SEQ ID NO: 8570 - protein, 10 aa, SARS coronavirus
VLKMLHSSSL

SEQ ID NO: 8571 - protein, 10 aa, SARS coronavirus
MLHSSSLTSL

SEQ ID NO: 8572 - protein, 10 aa, SARS coronavirus
MCKYTQSTAL

SEQ ID NO: 8573 - protein, 10 aa, SARS coronavirus
IQFMMSRRRL

SEQ ID NO: 8574 - protein, 9 aa, SARS coronavirus
YMAISPKFT

SEQ ID NO: 8575 - protein, 9 aa, SARS coronavirus
KMLHSSSLT

SEQ ID NO: 8576 - protein, 9 aa, SARS coronavirus
VILRIGTQV

SEQ ID NO: 8577 - protein, 9 aa, SARS coronavirus
FMMSRRRLL

SEQ ID NO: 8578 - protein, 9 aa, SARS coronavirus
SLHKLLQTL

SEQ ID NO: 8579 - protein, 9 aa, SARS coronavirus
QIQLSLLKV

SEQ ID NO: 8580 - protein, 9 aa, SARS coronavirus
LLQTLVLKM

SEQ ID NO: 8581 - protein, 9 aa, SARS coronavirus
LIQQWIQFM

SEQ ID NO: 8582 - protein, 9 aa, SARS coronavirus
TLFAGTHIT

SEQ ID NO: 8583 - protein, 9 aa, SARS coronavirus
LQTLVLKML

SEQ ID NO: 8584 - protein, 9 aa, SARS coronavirus
MMSRRRLLA

SEQ ID NO: 8585 - protein, 9 aa, SARS coronavirus
RMCKYTQST

SEQ ID NO: 8586 - protein, 9 aa, SARS coronavirus
TQSTALQEL

SEQ ID NO: 8587 - protein, 9 aa, SARS coronavirus
QLSLLKVTA

SEQ ID NO: 8588 - protein, 9 aa, SARS coronavirus
IQQWIQFMM

SEQ ID NO: 8589 - protein, 9 aa, SARS coronavirus
IQLSLLKVT

SEQ ID NO: 8590 - protein, 9 aa, SARS coronavirus
QELLIQQWI

SEQ ID NO: 8591 - protein, 9 aa, SARS coronavirus
SLLKTHRMC

SEQ ID NO: 8592 - protein, 9 aa, SARS coronavirus
FQHQNSKKT

SEQ ID NO: 8593 - protein, 9 aa, SARS coronavirus
TMTTVYHIT

SEQ ID NO: 8594 - protein, 10 aa, SARS coronavirus
KLLQTLVLKM

SEQ ID NO: 8595 - protein, 10 aa, SARS coronavirus
YMAISPKFTT

SEQ ID NO: 8596 - protein, 10 aa, SARS coronavirus
LLIQQWIQFM

SEQ ID NO: 8597 - protein, 10 aa, SARS coronavirus
LLQTLVLKML

SEQ ID NO: 8598 - protein, 10 aa, SARS coronavirus
MLHSSSLTSL

SEQ ID NO: 8599 - protein, 10 aa, SARS coronavirus
SLHKLLQTLV

SEQ ID NO: 8600 - protein, 10 aa, SARS coronavirus
FMMSRRRLLA

SEQ ID NO: 8601 - protein, 10 aa, SARS coronavirus
TMTTVYHITV

SEQ ID NO: 8602 - protein, 10 aa, SARS coronavirus
KLVVILRIGT

SEQ ID NO: 8603 - protein, 10 aa, SARS coronavirus
TLFAGTHITM

SEQ ID NO: 8604 - protein, 10 aa, SARS coronavirus
MMPTTLFAGT

SEQ ID NO: 8605 - protein, 10 aa, SARS coronavirus
SLSLHKLLQT

SEQ ID NO: 8606 - protein, 10 aa, SARS coronavirus
SQIQLSLLKV

SEQ ID NO: 8607 - protein, 10 aa, SARS coronavirus
MMSRRRLLAC

SEQ ID NO: 8608 - protein, 10 aa, SARS coronavirus
AISPKFTTSL

SEQ ID NO: 8609 - protein, 10 aa, SARS coronavirus
VVILRIGTQV

SEQ ID NO: 8610 - protein, 10 aa, SARS coronavirus
QVLKTMSLYM

SEQ ID NO: 8611 - protein, 10 aa, SARS coronavirus
VILRIGTQVL

SEQ ID NO: 8612 - protein, 10 aa, SARS coronavirus
CLCKHKKVST

SEQ ID NO: 8613 - protein, 10 aa, SARS coronavirus
LIQQWIQFMM

SEQ ID NO: 8614 - protein, 9 aa, SARS coronavirus
FTTSLSLHK

SEQ ID NO: 8615 - protein, 9 aa, SARS coronavirus
SQIQLSLLK

SEQ ID NO: 8616 - protein, 9 aa, SARS coronavirus
KLLQTLVLK

SEQ ID NO: 8617 - protein, 9 aa, SARS coronavirus
NLCTHSFRK

SEQ ID NO: 8618 - protein, 9 aa, SARS coronavirus
SLYMAISPK

SEQ ID NO: 8619 - protein, 9 aa, SARS coronavirus
LLKTHRMCK

SEQ ID NO: 8620 - protein, 9 aa, SARS coronavirus
HQNSKKTTK

SEQ ID NO: 8621 - protein, 10 aa, SARS coronavirus
KTTKLVVILR

SEQ ID NO: 8622 - protein, 10 aa, SARS coronavirus
KFTTSLSLHK

SEQ ID NO: 8623 - protein, 10 aa, SARS coronavirus
SLLKTHRMCK

SEQ ID NO: 8624 - protein, 10 aa, SARS coronavirus
VTAFQHQNSK

SEQ ID NO: 8625 - protein, 10 aa, SARS coronavirus
RLLACLCKHK

SEQ ID NO: 8626 - protein, 9 aa, SARS coronavirus
ILRIGTQVL

SEQ ID NO: 8627 - protein, 9 aa, SARS coronavirus
TVSQIQLSL

SEQ ID NO: 8628 - protein, 9 aa, SARS coronavirus
FMMSRRRLL

SEQ ID NO: 8629 - protein, 9 aa, SARS coronavirus
HITVSQIQL

SEQ ID NO: 8630 - protein, 9 aa, SARS coronavirus
VSQIQLSLL

SEQ ID NO: 8631 - protein, 9 aa, SARS coronavirus
QNSKKTTKL

SEQ ID NO: 8632 - protein, 9 aa, SARS coronavirus
KTTKLVVIL

SEQ ID NO: 8633 - protein, 9 aa, SARS coronavirus
TQVLKTMSL

SEQ ID NO: 8634 - protein, 9 aa, SARS coronavirus
ISPKFTTSL

SEQ ID NO: 8635 - protein, 9 aa, SARS coronavirus
TTSLSLHKL

SEQ ID NO: 8636 - protein, 9 aa, SARS coronavirus
TSLSLHKLL

SEQ ID NO: 8637 - protein, 9 aa, SARS coronavirus
SLHKLLQTL

SEQ ID NO: 8638 - protein, 9 aa, SARS coronavirus
LQTLVLKML

SEQ ID NO: 8639 - protein, 9 aa, SARS coronavirus
HSSSLTSLL

SEQ ID NO: 8640 - protein, 9 aa, SARS coronavirus
TQSTALQEL

SEQ ID NO: 8641 - protein, 9 aa, SARS coronavirus
QSTALQELL

SEQ ID NO: 8642 - protein, 9 aa, SARS coronavirus
SRRRLLACL

SEQ ID NO: 8643 - protein, 9 aa, SARS coronavirus
MPTTLFAGT

SEQ ID NO: 8644 - protein, 9 aa, SARS coronavirus
QFMMSRRRL

SEQ ID NO: 8645 - protein, 9 aa, SARS coronavirus
ITMTTVYHI

SEQ ID NO: 8646 - protein, 10 aa, SARS coronavirus
SPKFTTSLSL

SEQ ID NO: 8647 - protein, 10 aa, SARS coronavirus
MSRRRLLACL

SEQ ID NO: 8648 - protein, 10 aa, SARS coronavirus
TVSQIQLSLL

SEQ ID NO: 8649 - protein, 10 aa, SARS coronavirus
AISPKFTTSL

SEQ ID NO: 8650 - protein, 10 aa, SARS coronavirus
IQFMMSRRRL

SEQ ID NO: 8651 - protein, 10 aa, SARS coronavirus
QVLKTMSLYM

SEQ ID NO: 8652 - protein, 10 aa, SARS coronavirus
ITVSQIQLSL

SEQ ID NO: 8653 - protein, 10 aa, SARS coronavirus
HQNSKKTTKL

SEQ ID NO: 8654 - protein, 10 aa, SARS coronavirus
VILRIGTQVL

SEQ ID NO: 8655 - protein, 10 aa, SARS coronavirus
GTQVLKTMSL

SEQ ID NO: 8656 - protein, 10 aa, SARS coronavirus
FTTSLSLHKL

SEQ ID NO: 8657 - protein, 10 aa, SARS coronavirus
TTSLSLHKLL

SEQ ID NO: 8658 - protein, 10 aa, SARS coronavirus
LSLHKLLQTL

SEQ ID NO: 8659 - protein, 10 aa, SARS coronavirus
LLQTLVLKML

SEQ ID NO: 8660 - protein, 10 aa, SARS coronavirus
VLKMLHSSSL

SEQ ID NO: 8661 - protein, 10 aa, SARS coronavirus
MLHSSSLTSL

SEQ ID NO: 8662 - protein, 10 aa, SARS coronavirus
MCKYTQSTAL

SEQ ID NO: 8663 - protein, 10 aa, SARS coronavirus
YTQSTALQEL

SEQ ID NO: 8664 - protein, 10 aa, SARS coronavirus
TQSTALQELL

SEQ ID NO: 8665 - protein, 10 aa, SARS coronavirus
TVYHITVSQI

SEQ ID NO: 8666 - protein, 9 aa, SARS coronavirus
VSEETGTLI

SEQ ID NO: 8667 - protein, 9 aa, SARS coronavirus
SSEGVPDLL

SEQ ID NO: 8668 - protein, 9 aa, SARS coronavirus
LTALRLCAY

SEQ ID NO: 8669 - protein, 9 aa, SARS coronavirus
NIVNVSLVK

SEQ ID NO: 8670 - protein, 9 aa, SARS coronavirus
LVKPTVYVY

SEQ ID NO: 8671 - protein, 9 aa, SARS coronavirus
NSVLLFLAF

SEQ ID NO: 8672 - protein, 9 aa, SARS coronavirus
VSLVKPTVY

SEQ ID NO: 8673 - protein, 9 aa, SARS coronavirus
LIVNSVLLF

SEQ ID NO: 8674 - protein, 10 aa, SARS coronavirus
VSEETGTLIV

SEQ ID NO: 8675 - protein, 10 aa, SARS coronavirus
SSEGVPDLLV

SEQ ID NO: 8676 - protein, 10 aa, SARS coronavirus
TLIVNSVLLF

SEQ ID NO: 8677 - protein, 10 aa, SARS coronavirus
VTLAILTALR

SEQ ID NO: 8678 - protein, 10 aa, SARS coronavirus
ILTALRLCAY

SEQ ID NO: 8679 - protein, 10 aa, SARS coronavirus
NVSLVKPTVY

SEQ ID NO: 8680 - protein, 9 aa, SARS coronavirus
LLFLAFVVF

SEQ ID NO: 8681 - protein, 9 aa, SARS coronavirus
NIVNVSLVK

SEQ ID NO: 8682 - protein, 9 aa, SARS coronavirus
FLAFVVFLL

SEQ ID NO: 8683 - protein, 9 aa, SARS coronavirus
LVKPTVYVY

SEQ ID NO: 8684 - protein, 9 aa, SARS coronavirus
TLAILTALR

SEQ ID NO: 8685 - protein, 9 aa, SARS coronavirus
KPTVYVYSR

SEQ ID NO: 8686 - protein, 9 aa, SARS coronavirus
TVYVYSRVK

SEQ ID NO: 8687 - protein, 9 aa, SARS coronavirus
LIVNSVLLF

SEQ ID NO: 8688 - protein, 9 aa, SARS coronavirus
RLCAYCCNI

SEQ ID NO: 8689 - protein, 9 aa, SARS coronavirus
FLLVTLAIL

SEQ ID NO: 8690 - protein, 9 aa, SARS coronavirus
TLIVNSVLL

SEQ ID NO: 8691 - protein, 9 aa, SARS coronavirus
VLLFLAFVV

SEQ ID NO: 8692 - protein, 9 aa, SARS coronavirus
ALRLCAYCC

SEQ ID NO: 8693 - protein, 10 aa, SARS coronavirus
SLVKPTVYVY

SEQ ID NO: 8694 - protein, 10 aa, SARS coronavirus
LLFLAFVVFL

SEQ ID NO: 8695 - protein, 10 aa, SARS coronavirus
TLIVNSVLLF

SEQ ID NO: 8696 - protein, 10 aa, SARS coronavirus
VLLFLAFVVF

SEQ ID NO: 8697 - protein, 10 aa, SARS coronavirus
ILTALRLCAY

SEQ ID NO: 8698 - protein, 10 aa, SARS coronavirus
FLAFVVFLLV

SEQ ID NO: 8699 - protein, 10 aa, SARS coronavirus
TLAILTALRL

SEQ ID NO: 8700 - protein, 10 aa, SARS coronavirus
VVFLLVTLAI

SEQ ID NO: 8701 - protein, 10 aa, SARS coronavirus
LLVTLAILTA

SEQ ID NO: 8702 - protein, 9 aa, SARS coronavirus
LFLAFVVFL

SEQ ID NO: 8703 - protein, 9 aa, SARS coronavirus
VFLLVTLAI

SEQ ID NO: 8704 - protein, 9 aa, SARS coronavirus
GTLIVNSVL

SEQ ID NO: 8705 - protein, 9 aa, SARS coronavirus
IVNSVLLFL

SEQ ID NO: 8706 - protein, 9 aa, SARS coronavirus
VTLAILTAL

SEQ ID NO: 8707 - protein, 9 aa, SARS coronavirus
CCNIVNVSL

SEQ ID NO: 8708 - protein, 9 aa, SARS coronavirus
VYSRVKNLN

SEQ ID NO: 8709 - protein, 9 aa, SARS coronavirus
SSEGVPDLL

SEQ ID NO: 8710 - protein, 9 aa, SARS coronavirus
VYVYSRVKN

SEQ ID NO: 8711 - protein, 9 aa, SARS coronavirus
MYSFVSEET

SEQ ID NO: 8712 - protein, 9 aa, SARS coronavirus
FVVFLLVTL

SEQ ID NO: 8713 - protein, 9 aa, SARS coronavirus
TLIVNSVLL

SEQ ID NO: 8714 - protein, 9 aa, SARS coronavirus
FLLVTLAIL

SEQ ID NO: 8715 - protein, 9 aa, SARS coronavirus
LAILTALRL

SEQ ID NO: 8716 - protein, 9 aa, SARS coronavirus
FLAFVVFLL

SEQ ID NO: 8717 - protein, 9 aa, SARS coronavirus
AYCCNIVNV

SEQ ID NO: 8718 - protein, 9 aa, SARS coronavirus
FVSEETGTL

SEQ ID NO: 8719 - protein, 9 aa, SARS coronavirus
NSSEGVPDL

SEQ ID NO: 8720 - protein, 9 aa, SARS coronavirus
NSVLLFLAF

SEQ ID NO: 8721 - protein, 9 aa, SARS coronavirus
YVYSRVKNL

SEQ ID NO: 8722 - protein, 10 aa, SARS coronavirus
VYVYSRVKNL

SEQ ID NO: 8723 - protein, 10 aa, SARS coronavirus
LFLAFVVFLL

SEQ ID NO: 8724 - protein, 10 aa, SARS coronavirus
AFVVFLLVTL

SEQ ID NO: 8725 - protein, 10 aa, SARS coronavirus
SFVSEETGTL

SEQ ID NO: 8726 - protein, 10 aa, SARS coronavirus
VFLLVTLAIL

SEQ ID NO: 8727 - protein, 10 aa, SARS coronavirus
LIVNSVLLFL

SEQ ID NO: 8728 - protein, 10 aa, SARS coronavirus
AYCCNIVNVS

SEQ ID NO: 8729 - protein, 10 aa, SARS coronavirus
NSSEGVPDLL

SEQ ID NO: 8730 - protein, 10 aa, SARS coronavirus
GTLIVNSVLL

SEQ ID NO: 8731 - protein, 10 aa, SARS coronavirus
TGTLIVNSVL

SEQ ID NO: 8732 - protein, 10 aa, SARS coronavirus
LVTLAILTAL

SEQ ID NO: 8733 - protein, 10 aa, SARS coronavirus
YCCNIVNVSL

SEQ ID NO: 8734 - protein, 10 aa, SARS coronavirus
VYSRVKNLNS

SEQ ID NO: 8735 - protein, 10 aa, SARS coronavirus
LLFLAFVVFL

SEQ ID NO: 8736 - protein, 10 aa, SARS coronavirus
TLAILTALRL

SEQ ID NO: 8737 - protein, 10 aa, SARS coronavirus
LNSSEGVPDL

SEQ ID NO: 8738 - protein, 10 aa, SARS coronavirus
VLLFLAFVVF

SEQ ID NO: 8739 - protein, 10 aa, SARS coronavirus
TLIVNSVLLF

SEQ ID NO: 8740 - protein, 10 aa, SARS coronavirus
VNSVLLFLAF

SEQ ID NO: 8741 - protein, 10 aa, SARS coronavirus
VVFLLVTLAI

SEQ ID NO: 8742 - protein, 9 aa, SARS coronavirus
FLAFVVFLL

SEQ ID NO: 8743 - protein, 9 aa, SARS coronavirus
SVLLFLAFV

SEQ ID NO: 8744 - protein, 9 aa, SARS coronavirus
VLLFLAFVV

SEQ ID NO: 8745 - protein, 9 aa, SARS coronavirus
SLVKPTVYV

SEQ ID NO: 8746 - protein, 9 aa, SARS coronavirus
FLLVTLAIL

SEQ ID NO: 8747 - protein, 9 aa, SARS coronavirus
YVYSRVKNL

SEQ ID NO: 8748 - protein, 9 aa, SARS coronavirus
IVNSVLLFL

SEQ ID NO: 8749 - protein, 9 aa, SARS coronavirus
TLIVNSVLL

SEQ ID NO: 8750 - protein, 9 aa, SARS coronavirus
FVVFLLVTL

SEQ ID NO: 8751 - protein, 9 aa, SARS coronavirus
LLVTLAILT

SEQ ID NO: 8752 - protein, 9 aa, SARS coronavirus
LAFVVFLLV

SEQ ID NO: 8753 - protein, 9 aa, SARS coronavirus
RLCAYCCNI

SEQ ID NO: 8754 - protein, 9 aa, SARS coronavirus
ILTALRLCA

SEQ ID NO: 8755 - protein, 9 aa, SARS coronavirus
VVFLLVTLA

SEQ ID NO: 8756 - protein, 9 aa, SARS coronavirus
NVSLVKPTV

SEQ ID NO: 8757 - protein, 9 aa, SARS coronavirus
FVSEETGTL

SEQ ID NO: 8758 - protein, 9 aa, SARS coronavirus
LFLAFVVFL

SEQ ID NO: 8759 - protein, 9 aa, SARS coronavirus
VTLAILTAL

SEQ ID NO: 8760 - protein, 9 aa, SARS coronavirus
KNLNSSEGV

SEQ ID NO: 8761 - protein, 9 aa, SARS coronavirus
LVTLAILTA

SEQ ID NO: 8762 - protein, 10 aa, SARS coronavirus
LLFLAFVVFL

SEQ ID NO: 8763 - protein, 10 aa, SARS coronavirus
FLAFVVFLLV

SEQ ID NO: 8764 - protein, 10 aa, SARS coronavirus
FLLVTLAILT

SEQ ID NO: 8765 - protein, 10 aa, SARS coronavirus
LIVNSVLLFL

SEQ ID NO: 8766 - protein, 10 aa, SARS coronavirus
SVLLFLAFVV

SEQ ID NO: 8767 - protein, 10 aa, SARS coronavirus
RLCAYCCNIV

SEQ ID NO: 8768 - protein, 10 aa, SARS coronavirus
NSVLLFLAFV

SEQ ID NO: 8769 - protein, 10 aa, SARS coronavirus
TLAILTALRL

SEQ ID NO: 8770 - protein, 10 aa, SARS coronavirus
LLVTLAILTA

SEQ ID NO: 8771 - protein, 10 aa, SARS coronavirus
FVSEETGTLI

SEQ ID NO: 8772 - protein, 10 aa, SARS coronavirus
VSLVKPTVYV

SEQ ID NO: 8773 - protein, 10 aa, SARS coronavirus
IVNSVLLFLA

SEQ ID NO: 8774 - protein, 10 aa, SARS coronavirus
LVTLAILTAL

SEQ ID NO: 8775 - protein, 10 aa, SARS coronavirus
CAYCCNIVNV

SEQ ID NO: 8776 - protein, 10 aa, SARS coronavirus
VVFLLVTLAI

SEQ ID NO: 8777 - protein, 10 aa, SARS coronavirus
FVVFLLVTLA

SEQ ID NO: 8778 - protein, 10 aa, SARS coronavirus
IVNVSLVKPT

SEQ ID NO: 8779 - protein, 10 aa, SARS coronavirus
AILTALRLCA

SEQ ID NO: 8780 - protein, 10 aa, SARS coronavirus
KPTVYVYSRV

SEQ ID NO: 8781 - protein, 10 aa, SARS coronavirus
LAFVVFLLVT

SEQ ID NO: 8782 - protein, 9 aa, SARS coronavirus
NIVNVSLVK

SEQ ID NO: 8783 - protein, 9 aa, SARS coronavirus
FVSEETGTL

SEQ ID NO: 8784 - protein, 9 aa, SARS coronavirus
IVNSVLLFL

SEQ ID NO: 8785 - protein, 9 aa, SARS coronavirus
FVVFLLVTL

SEQ ID NO: 8786 - protein, 9 aa, SARS coronavirus
YVYSRVKNL

SEQ ID NO: 8787 - protein, 9 aa, SARS coronavirus
LAILTALRL

SEQ ID NO: 8788 - protein, 9 aa, SARS coronavirus
GTLIVNSVL

SEQ ID NO: 8789 - protein, 9 aa, SARS coronavirus
TLIVNSVLL

SEQ ID NO: 8790 - protein, 9 aa, SARS coronavirus
FLAFVVFLL

SEQ ID NO: 8791 - protein, 9 aa, SARS coronavirus
FLLVTLAIL

SEQ ID NO: 8792 - protein, 9 aa, SARS coronavirus
VTLAILTAL

SEQ ID NO: 8793 - protein, 9 aa, SARS coronavirus
CCNIVNVSL

SEQ ID NO: 8794 - protein, 9 aa, SARS coronavirus
NSSEGVPDL

SEQ ID NO: 8795 - protein, 9 aa, SARS coronavirus
ALRLCAYCC

SEQ ID NO: 8796 - protein, 9 aa, SARS coronavirus
SSEGVPDLL

SEQ ID NO: 8797 - protein, 9 aa, SARS coronavirus
SVLLFLAFV

SEQ ID NO: 8798 - protein, 9 aa, SARS coronavirus
NVSLVKPTV

SEQ ID NO: 8799 - protein, 9 aa, SARS coronavirus
LAFVVFLLV

SEQ ID NO: 8800 - protein, 9 aa, SARS coronavirus
VVFLLVTLA

SEQ ID NO: 8801 - protein, 9 aa, SARS coronavirus
LVTLAILTA

SEQ ID NO: 8802 - protein, 10 aa, SARS coronavirus
LVTLAILTAL

SEQ ID NO: 8803 - protein, 10 aa, SARS coronavirus
TGTLIVNSVL

SEQ ID NO: 8804 - protein, 10 aa, SARS coronavirus
GTLIVNSVLL

SEQ ID NO: 8805 - protein, 10 aa, SARS coronavirus
LIVNSVLLFL

SEQ ID NO: 8806 - protein, 10 aa, SARS coronavirus
LLFLAFVVFL

SEQ ID NO: 8807 - protein, 10 aa, SARS coronavirus
TLAILTALRL

SEQ ID NO: 8808 - protein, 10 aa, SARS coronavirus
YCCNIVNVSL

SEQ ID NO: 8809 - protein, 10 aa, SARS coronavirus
KPTVYVYSRV

SEQ ID NO: 8810 - protein, 10 aa, SARS coronavirus
LNSSEGVPDL

SEQ ID NO: 8811 - protein, 10 aa, SARS coronavirus
NSSEGVPDLL

SEQ ID NO: 8812 - protein, 10 aa, SARS coronavirus
FVSEETGTLI

SEQ ID NO: 8813 - protein, 10 aa, SARS coronavirus
VVFLLVTLAI

SEQ ID NO: 8814 - protein, 10 aa, SARS coronavirus
AFVVFLLVTL

SEQ ID NO: 8815 - protein, 10 aa, SARS coronavirus
SVLLFLAFVV

SEQ ID NO: 8816 - protein, 10 aa, SARS coronavirus
ALRLCAYCCN

SEQ ID NO: 8817 - protein, 10 aa, SARS coronavirus
CAYCCNIVNV

SEQ ID NO: 8818 - protein, 10 aa, SARS coronavirus
IVNSVLLFLA

SEQ ID NO: 8819 - protein, 10 aa, SARS coronavirus
FVVFLLVTLA

SEQ ID NO: 8820 - protein, 10 aa, SARS coronavirus
IVNVSLVKPT

SEQ ID NO: 8821 - protein, 9 aa, SARS coronavirus
GTDSGFAAY

SEQ ID NO: 8822 - protein, 9 aa, SARS coronavirus
RCDIKDLPK

SEQ ID NO: 8823 - protein, 9 aa, SARS coronavirus
LLEQWNLVI

SEQ ID NO: 8824 - protein, 9 aa, SARS coronavirus
MADNGTITV

SEQ ID NO: 8825 - protein, 9 aa, SARS coronavirus
WIMLLQFAY

SEQ ID NO: 8826 - protein, 9 aa, SARS coronavirus
IVGLMWLSY

SEQ ID NO: 8827 - protein, 9 aa, SARS coronavirus
VATSRTLSY

SEQ ID NO: 8828 - protein, 9 aa, SARS coronavirus
ESELVIGAV

SEQ ID NO: 8829 - protein, 9 aa, SARS coronavirus
NPETNILLN

SEQ ID NO: 8830 - protein, 9 aa, SARS coronavirus
ACFVLAAVY

SEQ ID NO: 8831 - protein, 9 aa, SARS coronavirus
TVEELKQLL

SEQ ID NO: 8832 - protein, 9 aa, SARS coronavirus
LMESELVIG

SEQ ID NO: 8833 - protein, 9 aa, SARS coronavirus
SNDNIALLV

SEQ ID NO: 8834 - protein, 9 aa, SARS coronavirus
GTITVEELK

SEQ ID NO: 8835 - protein, 9 aa, SARS coronavirus
FLYIIKLVF

SEQ ID NO: 8836 - protein, 9 aa, SARS coronavirus
VASFRLFAR

SEQ ID NO: 8837 - protein, 9 aa, SARS coronavirus
LVIGAVIIR

SEQ ID NO: 8838 - protein, 10 aa, SARS coronavirus
ESELVIGAVI

SEQ ID NO: 8839 - protein, 10 aa, SARS coronavirus
CIVGLMWLSY

SEQ ID NO: 8840 - protein, 10 aa, SARS coronavirus
TVATSRTLSY

SEQ ID NO: 8841 - protein, 10 aa, SARS coronavirus
GTDSGFAAYN

SEQ ID NO: 8842 - protein, 10 aa, SARS coronavirus
LMESELVIGA

SEQ ID NO: 8843 - protein, 10 aa, SARS coronavirus
LLEQWNLVIG

SEQ ID NO: 8844 - protein, 10 aa, SARS coronavirus
NTDHAGSNDN

SEQ ID NO: 8845 - protein, 10 aa, SARS coronavirus
NPETNILLNV

SEQ ID NO: 8846 - protein, 10 aa, SARS coronavirus
LACFVLAAVY

SEQ ID NO: 8847 - protein, 10 aa, SARS coronavirus
DSGFAAYNRY

SEQ ID NO: 8848 - protein, 10 aa, SARS coronavirus
SNDNIALLVQ

SEQ ID NO: 8849 - protein, 10 aa, SARS coronavirus
FLAWIMLLQF

SEQ ID NO: 8850 - protein, 10 aa, SARS coronavirus
FVASFRLFAR

SEQ ID NO: 8851 - protein, 10 aa, SARS coronavirus
ELVIGAVIIR

SEQ ID NO: 8852 - protein, 10 aa, SARS coronavirus
VATSRTLSYY

SEQ ID NO: 8853 - protein, 9 aa, SARS coronavirus
FLYIIKLVF

SEQ ID NO: 8854 - protein, 9 aa, SARS coronavirus
WLSYFVASF

SEQ ID NO: 8855 - protein, 9 aa, SARS coronavirus
RMAGHSLGR

SEQ ID NO: 8856 - protein, 9 aa, SARS coronavirus
GTITVEELK

SEQ ID NO: 8857 - protein, 9 aa, SARS coronavirus
FLFLAWIML

SEQ ID NO: 8858 - protein, 9 aa, SARS coronavirus
NLVIGFLFL

SEQ ID NO: 8859 - protein, 9 aa, SARS coronavirus
LVIGAVIIR

SEQ ID NO: 8860 - protein, 9 aa, SARS coronavirus
LLWPVTLAC

SEQ ID NO: 8861 - protein, 9 aa, SARS coronavirus
LLQFAYSNR

SEQ ID NO: 8862 - protein, 9 aa, SARS coronavirus
LLEQWNLVI

SEQ ID NO: 8863 - protein, 9 aa, SARS coronavirus
TLACFVLAA

SEQ ID NO: 8864 - protein, 9 aa, SARS coronavirus
LMWLSYFVA

SEQ ID NO: 8865 - protein, 9 aa, SARS coronavirus
GLMWLSYFV

SEQ ID NO: 8866 - protein, 9 aa, SARS coronavirus
WIMLLQFAY

SEQ ID NO: 8867 - protein, 9 aa, SARS coronavirus
KLVFLWLLW

SEQ ID NO: 8868 - protein, 9 aa, SARS coronavirus
NILLNVPLR

SEQ ID NO: 8869 - protein, 9 aa, SARS coronavirus
GTDSGFAAY

SEQ ID NO: 8870 - protein, 9 aa, SARS coronavirus
SMWSFNPET

SEQ ID NO: 8871 - protein, 9 aa, SARS coronavirus
WLLWPVTLA

SEQ ID NO: 8872 - protein, 9 aa, SARS coronavirus
TLSYYKLGA

SEQ ID NO: 8873 - protein, 10 aa, SARS coronavirus
FLFLAWIMLL

SEQ ID NO: 8874 - protein, 10 aa, SARS coronavirus
LLWPVTLACF

SEQ ID NO: 8875 - protein, 10 aa, SARS coronavirus
ELVIGAVIIR

SEQ ID NO: 8876 - protein, 10 aa, SARS coronavirus
FLWLLWPVTL

SEQ ID NO: 8877 - protein, 10 aa, SARS coronavirus
QLLEQWNLVI

SEQ ID NO: 8878 - protein, 10 aa, SARS coronavirus
FLAWIMLLQF

SEQ ID NO: 8879 - protein, 10 aa, SARS coronavirus
MLLQFAYSNR

SEQ ID NO: 8880 - protein, 10 aa, SARS coronavirus
WLSYFVASFR

SEQ ID NO: 8881 - protein, 10 aa, SARS coronavirus
FLYIIKLVFL

SEQ ID NO: 8882 - protein, 10 aa, SARS coronavirus
NLVIGFLFLA

SEQ ID NO: 8883 - protein, 10 aa, SARS coronavirus
ATSRTLSYYK

SEQ ID NO: 8884 - protein, 10 aa, SARS coronavirus
GLMWLSYFVA

SEQ ID NO: 8885 - protein, 10 aa, SARS coronavirus
CIVGLMWLSY

SEQ ID NO: 8886 - protein, 10 aa, SARS coronavirus
LMWLSYFVAS

SEQ ID NO: 8887 - protein, 10 aa, SARS coronavirus
FVASFRLFAR

SEQ ID NO: 8888 - protein, 10 aa, SARS coronavirus
VLAAVYRINW

SEQ ID NO: 8889 - protein, 10 aa, SARS coronavirus
LMESELVIGA

SEQ ID NO: 8890 - protein, 10 aa, SARS coronavirus
RLFARTRSMW

SEQ ID NO: 8891 - protein, 10 aa, SARS coronavirus
WLLWPVTLAC

SEQ ID NO: 8892 - protein, 10 aa, SARS coronavirus
IVGLMWLSYF

SEQ ID NO: 8893 - protein, 9 aa, SARS coronavirus
RYRIGNYKL

SEQ ID NO: 8894 - protein, 9 aa, SARS coronavirus
LYIIKLVFL

SEQ ID NO: 8895 - protein, 9 aa, SARS coronavirus
AYSNRNRFL

SEQ ID NO: 8896 - protein, 9 aa, SARS coronavirus
SYFVASFRL

SEQ ID NO: 8897 - protein, 9 aa, SARS coronavirus
SFNPETNIL

SEQ ID NO: 8898 - protein, 9 aa, SARS coronavirus
LFLAWIMLL

SEQ ID NO: 8899 - protein, 9 aa, SARS coronavirus
YFVASFRLF

SEQ ID NO: 8900 - protein, 9 aa, SARS coronavirus
KQLLEQWNL

SEQ ID NO: 8901 - protein, 9 aa, SARS coronavirus
RGTIVTRPL

SEQ ID NO: 8902 - protein, 9 aa, SARS coronavirus
TVEELKQLL

SEQ ID NO: 8903 - protein, 9 aa, SARS coronavirus
QWNLVIGFL

SEQ ID NO: 8904 - protein, 9 aa, SARS coronavirus
GAVIIRGHL

SEQ ID NO: 8905 - protein, 9 aa, SARS coronavirus
AYNRYRIGN

SEQ ID NO: 8906 - protein, 9 aa, SARS coronavirus
ITVEELKQL

SEQ ID NO: 8907 - protein, 9 aa, SARS coronavirus
NLVIGFLFL

SEQ ID NO: 8908 - protein, 9 aa, SARS coronavirus
FNPETNILL

SEQ ID NO: 8909 - protein, 9 aa, SARS coronavirus
TNILLNVPL

SEQ ID NO: 8910 - protein, 9 aa, SARS coronavirus
GSNDNIALL

SEQ ID NO: 8911 - protein, 9 aa, SARS coronavirus
IIKLVFLWL

SEQ ID NO: 8912 - protein, 9 aa, SARS coronavirus
LWLLWPVTL

SEQ ID NO: 8913 - protein, 10 aa, SARS coronavirus
SYFVASFRLF

SEQ ID NO: 8914 - protein, 10 aa, SARS coronavirus
RFLYIIKLVF

SEQ ID NO: 8915 - protein, 10 aa, SARS coronavirus
SFNPETNILL

SEQ ID NO: 8916 - protein, 10 aa, SARS coronavirus
GFLFLAWIML

SEQ ID NO: 8917 - protein, 10 aa, SARS coronavirus
QFAYSNRNRF

SEQ ID NO: 8918 - protein, 10 aa, SARS coronavirus
ITVEELKQLL

SEQ ID NO: 8919 - protein, 10 aa, SARS coronavirus
YIIKLVFLWL

SEQ ID NO: 8920 - protein, 10 aa, SARS coronavirus
RYRIGNYKLN

SEQ ID NO: 8921 - protein, 10 aa, SARS coronavirus
LYIIKLVFLW

SEQ ID NO: 8922 - protein, 10 aa, SARS coronavirus
RNRFLYIIKL

SEQ ID NO: 8923 - protein, 10 aa, SARS coronavirus
CFVLAAVYRI

SEQ ID NO: 8924 - protein, 10 aa, SARS coronavirus
AYNRYRIGNY

SEQ ID NO: 8925 - protein, 10 aa, SARS coronavirus
WNLVIGFLFL

SEQ ID NO: 8926 - protein, 10 aa, SARS coronavirus
ETNILLNVPL

SEQ ID NO: 8927 - protein, 10 aa, SARS coronavirus
WPVTLACFVL

SEQ ID NO: 8928 - protein, 10 aa, SARS coronavirus
YYKLGASQRV

SEQ ID NO: 8929 - protein, 10 aa, SARS coronavirus
EQWNLVIGFL

SEQ ID NO: 8930 - protein, 10 aa, SARS coronavirus
IGAVIIRGHL

SEQ ID NO: 8931 - protein, 10 aa, SARS coronavirus
VTRPLMESEL

SEQ ID NO: 8932 - protein, 10 aa, SARS coronavirus
AYSNRNRFLY

SEQ ID NO: 8933 - protein, 9 aa, SARS coronavirus
QLLEQWNLV

SEQ ID NO: 8934 - protein, 9 aa, SARS coronavirus
GLMWLSYFV

SEQ ID NO: 8935 - protein, 9 aa, SARS coronavirus
FLFLAWIML

SEQ ID NO: 8936 - protein, 9 aa, SARS coronavirus
NLVIGFLFL

SEQ ID NO: 8937 - protein, 9 aa, SARS coronavirus
KQLLEQWNL

SEQ ID NO: 8938 - protein, 9 aa, SARS coronavirus
FLWLLWPVT

SEQ ID NO: 8939 - protein, 9 aa, SARS coronavirus
WLLWPVTLA

SEQ ID NO: 8940 - protein, 9 aa, SARS coronavirus
LMWLSYFVA

SEQ ID NO: 8941 - protein, 9 aa, SARS coronavirus
SMWSFNPET

SEQ ID NO: 8942 - protein, 9 aa, SARS coronavirus
LLWPVTLAC

SEQ ID NO: 8943 - protein, 9 aa, SARS coronavirus
TLACFVLAA

SEQ ID NO: 8944 - protein, 9 aa, SARS coronavirus
FVASFRLFA

SEQ ID NO: 8945 - protein, 9 aa, SARS coronavirus
LVIGFLFLA

SEQ ID NO: 8946 - protein, 9 aa, SARS coronavirus
FVLAAVYRI

SEQ ID NO: 8947 - protein, 9 aa, SARS coronavirus
IGFLFLAWI

SEQ ID NO: 8948 - protein, 9 aa, SARS coronavirus
IKLVFLWLL

SEQ ID NO: 8949 - protein, 9 aa, SARS coronavirus
AAVYRINWV

SEQ ID NO: 8950 - protein, 9 aa, SARS coronavirus
WPVTLACFV

SEQ ID NO: 8951 - protein, 9 aa, SARS coronavirus
AVYRINWVT

SEQ ID NO: 8952 - protein, 9 aa, SARS coronavirus
LLNVPLRGT

SEQ ID NO: 8953 - protein, 10 aa, SARS coronavirus
FLYIIKLVFL

SEQ ID NO: 8954 - protein, 10 aa, SARS coronavirus
FLFLAWIMLL

SEQ ID NO: 8955 - protein, 10 aa, SARS coronavirus
FLWLLWPVTL

SEQ ID NO: 8956 - protein, 10 aa, SARS coronavirus
LVFLWLLWPV

SEQ ID NO: 8957 - protein, 10 aa, SARS coronavirus
NLVIGFLFLA

SEQ ID NO: 8958 - protein, 10 aa, SARS coronavirus
TLACFVLAAV

SEQ ID NO: 8959 - protein, 10 aa, SARS coronavirus
KQLLEQWNLV

SEQ ID NO: 8960 - protein, 10 aa, SARS coronavirus
YIIKLVFLWL

SEQ ID NO: 8961 - protein, 10 aa, SARS coronavirus
VIGFLFLAWI

SEQ ID NO: 8962 - protein, 10 aa, SARS coronavirus
WLLWPVTLAC

SEQ ID NO: 8963 - protein, 10 aa, SARS coronavirus
GLMWLSYFVA

SEQ ID NO: 8964 - protein, 10 aa, SARS coronavirus
QLLEQWNLVI

SEQ ID NO: 8965 - protein, 10 aa, SARS coronavirus
SLGRCDIKDL

SEQ ID NO: 8966 - protein, 10 aa, SARS coronavirus
KLGASQRVGT

SEQ ID NO: 8967 - protein, 10 aa, SARS coronavirus
WNLVIGFLFL

SEQ ID NO: 8968 - protein, 10 aa, SARS coronavirus
ILLNVPLRGT

SEQ ID NO: 8969 - protein, 10 aa, SARS coronavirus
LAAVYRINWV

SEQ ID NO: 8970 - protein, 10 aa, SARS coronavirus
VGLMWLSYFV

SEQ ID NO: 8971 - protein, 10 aa, SARS coronavirus
LAWIMLLQFA

SEQ ID NO: 8972 - protein, 10 aa, SARS coronavirus
IIKLVFLWLL

SEQ ID NO: 8973 - protein, 9 aa, SARS coronavirus
GTITVEELK

SEQ ID NO: 8974 - protein, 9 aa, SARS coronavirus
LVIGAVIIR

SEQ ID NO: 8975 - protein, 9 aa, SARS coronavirus
RCDIKDLPK

SEQ ID NO: 8976 - protein, 9 aa, SARS coronavirus
AVIIRGHLR

SEQ ID NO: 8977 - protein, 10 aa, SARS coronavirus
ATSRTLSYYK

SEQ ID NO: 8978 - protein, 10 aa, SARS coronavirus
FVASFRLFAR

SEQ ID NO: 8979 - protein, 9 aa, SARS coronavirus
HLRMAGHSL

SEQ ID NO: 8980 - protein, 9 aa, SARS coronavirus
LGRCDIKDL

SEQ ID NO: 8981 - protein, 9 aa, SARS coronavirus
IAMACIVGL

SEQ ID NO: 8982 - protein, 9 aa, SARS coronavirus
GAVIIRGHL

SEQ ID NO: 8983 - protein, 9 aa, SARS coronavirus
ACIVGLMWL

SEQ ID NO: 8984 - protein, 9 aa, SARS coronavirus
AGSNDNIAL

SEQ ID NO: 8985 - protein, 9 aa, SARS coronavirus
TVEELKQLL

SEQ ID NO: 8986 - protein, 9 aa, SARS coronavirus
NGTITVEEL

SEQ ID NO: 8987 - protein, 9 aa, SARS coronavirus
ITVEELKQL

SEQ ID NO: 8988 - protein, 9 aa, SARS coronavirus
KQLLEQWNL

SEQ ID NO: 8989 - protein, 9 aa, SARS coronavirus
NLVIGFLFL

SEQ ID NO: 8990 - protein, 9 aa, SARS coronavirus
FLFLAWIML

SEQ ID NO: 8991 - protein, 9 aa, SARS coronavirus
SNRNRFLYI

SEQ ID NO: 8992 - protein, 9 aa, SARS coronavirus
IIKLVFLWL

SEQ ID NO: 8993 - protein, 9 aa, SARS coronavirus
WPVTLACFV

SEQ ID NO: 8994 - protein, 9 aa, SARS coronavirus
FNPETNILL

SEQ ID NO: 8995 - protein, 9 aa, SARS coronavirus
TNILLNVPL

SEQ ID NO: 8996 - protein, 9 aa, SARS coronavirus
RGTIVTRPL

SEQ ID NO: 8997 - protein, 9 aa, SARS coronavirus
RPLMESELV

SEQ ID NO: 8998 - protein, 9 aa, SARS coronavirus
ITVATSRTL

SEQ ID NO: 8999 - protein, 10 aa, SARS coronavirus
WPVTLACFVL

SEQ ID NO: 9000 - protein, 10 aa, SARS coronavirus
RNRFLYIIKL

SEQ ID NO: 9001 - protein, 10 aa, SARS coronavirus
VTRPLMESEL

SEQ ID NO: 9002 - protein, 10 aa, SARS coronavirus
TSRTLSYYKL

SEQ ID NO: 9003 - protein, 10 aa, SARS coronavirus
AVIIRGHLRM

SEQ ID NO: 9004 - protein, 10 aa, SARS coronavirus
FAYSNRNRFL

SEQ ID NO: 9005 - protein, 10 aa, SARS coronavirus
AIAMACIVGL

SEQ ID NO: 9006 - protein, 10 aa, SARS coronavirus
MACIVGLMWL

SEQ ID NO: 9007 - protein, 10 aa, SARS coronavirus
HAGSNDNIAL

SEQ ID NO: 9008 - protein, 10 aa, SARS coronavirus
AGSNDNIALL

SEQ ID NO: 9009 - protein, 10 aa, SARS coronavirus
IAMACIVGLM

SEQ ID NO: 9010 - protein, 10 aa, SARS coronavirus
RPLMESELVI

SEQ ID NO: 9011 - protein, 10 aa, SARS coronavirus
IGAVIIRGHL

SEQ ID NO: 9012 - protein, 10 aa, SARS coronavirus
WVTGGIAIAM

SEQ ID NO: 9013 - protein, 10 aa, SARS coronavirus
DNGTITVEEL

SEQ ID NO: 9014 - protein, 10 aa, SARS coronavirus
TITVEELKQL

SEQ ID NO: 9015 - protein, 10 aa, SARS coronavirus
ITVEELKQLL

SEQ ID NO: 9016 - protein, 10 aa, SARS coronavirus
EQWNLVIGFL

SEQ ID NO: 9017 - protein, 10 aa, SARS coronavirus
WNLVIGFLFL

SEQ ID NO: 9018 - protein, 10 aa, SARS coronavirus
FLFLAWIMLL

SEQ ID NO: 9019 - protein, 9 aa, SARS coronavirus
DEEPMELDY

SEQ ID NO: 9020 - protein, 9 aa, SARS coronavirus
IAEILIIIM

SEQ ID NO: 9021 - protein, 9 aa, SARS coronavirus
SSIVRQLFK

SEQ ID NO: 9022 - protein, 9 aa, SARS coronavirus
LVDFQVTIA

SEQ ID NO: 9023 - protein, 9 aa, SARS coronavirus
NLDVIISSI

SEQ ID NO: 9024 - protein, 9 aa, SARS coronavirus
DVIISSIVR

SEQ ID NO: 9025 - protein, 10 aa, SARS coronavirus
IAEILIIIMR

SEQ ID NO: 9026 - protein, 10 aa, SARS coronavirus
DDEEPMELDY

SEQ ID NO: 9027 - protein, 10 aa, SARS coronavirus
ELDDEEPMEL

SEQ ID NO: 9028 - protein, 10 aa, SARS coronavirus
ISSIVRQLFK

SEQ ID NO: 9029 - protein, 10 aa, SARS coronavirus
YSELDDEEPM

SEQ ID NO: 9030 - protein, 10 aa, SARS coronavirus
NLDVIISSIV

SEQ ID NO: 9031 - protein, 9 aa, SARS coronavirus
QLFKPLTKK

SEQ ID NO: 9032 - protein, 9 aa, SARS coronavirus
IMRTFRIAI

SEQ ID NO: 9033 - protein, 9 aa, SARS coronavirus
HLVDFQVTI

SEQ ID NO: 9034 - protein, 9 aa, SARS coronavirus
RQLFKPLTK

SEQ ID NO: 9035 - protein, 9 aa, SARS coronavirus
NLDVIISSI

SEQ ID NO: 9036 - protein, 9 aa, SARS coronavirus
ILIIIMRTF

SEQ ID NO: 9037 - protein, 9 aa, SARS coronavirus
LIIIMRTFR

SEQ ID NO: 9038 - protein, 10 aa, SARS coronavirus
ILIIIMRTFR

SEQ ID NO: 9039 - protein, 10 aa, SARS coronavirus
RQLFKPLTKK

SEQ ID NO: 9040 - protein, 10 aa, SARS coronavirus
HLVDFQVTIA

SEQ ID NO: 9041 - protein, 10 aa, SARS coronavirus
RTFRIAIWNL

SEQ ID NO: 9042 - protein, 10 aa, SARS coronavirus
IIMRTFRIAI

SEQ ID NO: 9043 - protein, 9 aa, SARS coronavirus
TFRIAIWNL

SEQ ID NO: 9044 - protein, 9 aa, SARS coronavirus
FQVTIAEIL

SEQ ID NO: 9045 - protein, 9 aa, SARS coronavirus
DFQVTIAEI

SEQ ID NO: 9046 - protein, 9 aa, SARS coronavirus
IVRQLFKPL

SEQ ID NO: 9047 - protein, 9 aa, SARS coronavirus
IISSIVRQL

SEQ ID NO: 9048 - protein, 9 aa, SARS coronavirus
LTKKNYSEL

SEQ ID NO: 9049 - protein, 9 aa, SARS coronavirus
ILIIIMRTF

SEQ ID NO: 9050 - protein, 9 aa, SARS coronavirus
ISSIVRQLF

SEQ ID NO: 9051 - protein, 9 aa, SARS coronavirus
HLVDFQVTI

SEQ ID NO: 9052 - protein, 9 aa, SARS coronavirus
TIAEILIII

SEQ ID NO: 9053 - protein, 9 aa, SARS coronavirus
VTIAEILII

SEQ ID NO: 9054 - protein, 9 aa, SARS coronavirus
IIIMRTFRI

SEQ ID NO: 9055 - protein, 9 aa, SARS coronavirus
IAIWNLDVI

SEQ ID NO: 9056 - protein, 9 aa, SARS coronavirus
NLDVIISSI

SEQ ID NO: 9057 - protein, 9 aa, SARS coronavirus
AIWNLDVII

SEQ ID NO: 9058 - protein, 9 aa, SARS coronavirus
QVTIAEILI

SEQ ID NO: 9059 - protein, 9 aa, SARS coronavirus
IMRTFRIAI

SEQ ID NO: 9060 - protein, 9 aa, SARS coronavirus
IAEILIIIM

SEQ ID NO: 9061 - protein, 9 aa, SARS coronavirus
LFKPLTKKN

SEQ ID NO: 9062 - protein, 9 aa, SARS coronavirus
NYSELDDEE

SEQ ID NO: 9063 - protein, 10 aa, SARS coronavirus
DFQVTIAEIL

SEQ ID NO: 9064 - protein, 10 aa, SARS coronavirus
SIVRQLFKPL

SEQ ID NO: 9065 - protein, 10 aa, SARS coronavirus
VIISSIVRQL

SEQ ID NO: 9066 - protein, 10 aa, SARS coronavirus
RTFRIAIWNL

SEQ ID NO: 9067 - protein, 10 aa, SARS coronavirus
ELDDEEPMEL

SEQ ID NO: 9068 - protein, 10 aa, SARS coronavirus
EILIIIMRTF

SEQ ID NO: 9069 - protein, 10 aa, SARS coronavirus
IISSIVRQLF

SEQ ID NO: 9070 - protein, 10 aa, SARS coronavirus
WNLDVIISSI

SEQ ID NO: 9071 - protein, 10 aa, SARS coronavirus
VTIAEILIII

SEQ ID NO: 9072 - protein, 10 aa, SARS coronavirus
RIAIWNLDVI

SEQ ID NO: 9073 - protein, 10 aa, SARS coronavirus
IAIWNLDVII

SEQ ID NO: 9074 - protein, 10 aa, SARS coronavirus
FQVTIAEILI

SEQ ID NO: 9075 - protein, 10 aa, SARS coronavirus
LIIIMRTFRI

SEQ ID NO: 9076 - protein, 10 aa, SARS coronavirus
IIMRTFRIAI

SEQ ID NO: 9077 - protein, 10 aa, SARS coronavirus
QVTIAEILII

SEQ ID NO: 9078 - protein, 10 aa, SARS coronavirus
YSELDDEEPM

SEQ ID NO: 9079 - protein, 10 aa, SARS coronavirus
MFHLVDFQVT

SEQ ID NO: 9080 - protein, 10 aa, SARS coronavirus
TIAEILIIIM

SEQ ID NO: 9081 - protein, 10 aa, SARS coronavirus
NYSELDDEEP

SEQ ID NO: 9082 - protein, 10 aa, SARS coronavirus
LFKPLTKKNY

SEQ ID NO: 9083 - protein, 9 aa, SARS coronavirus
IIIMRTFRI

SEQ ID NO: 9084 - protein, 9 aa, SARS coronavirus
NLDVIISSI

SEQ ID NO: 9085 - protein, 9 aa, SARS coronavirus
RIAIWNLDV

SEQ ID NO: 9086 - protein, 9 aa, SARS coronavirus
TIAEILIII

SEQ ID NO: 9087 - protein, 9 aa, SARS coronavirus
HLVDFQVTI

SEQ ID NO: 9088 - protein, 9 aa, SARS coronavirus
AIWNLDVII

SEQ ID NO: 9089 - protein, 9 aa, SARS coronavirus
IMRTFRIAI

SEQ ID NO: 9090 - protein, 9 aa, SARS coronavirus
IISSIVRQL

SEQ ID NO: 9091 - protein, 9 aa, SARS coronavirus
FQVTIAEIL

SEQ ID NO: 9092 - protein, 9 aa, SARS coronavirus
QVTIAEILI

SEQ ID NO: 9093 - protein, 9 aa, SARS coronavirus
SELDDEEPM

SEQ ID NO: 9094 - protein, 9 aa, SARS coronavirus
IIMRTFRIA

SEQ ID NO: 9095 - protein, 9 aa, SARS coronavirus
EILIIIMRT

SEQ ID NO: 9096 - protein, 10 aa, SARS coronavirus
IIMRTFRIAI

SEQ ID NO: 9097 - protein, 10 aa, SARS coronavirus
RTFRIAIWNL

SEQ ID NO: 9098 - protein, 10 aa, SARS coronavirus
LIIIMRTFRI

SEQ ID NO: 9099 - protein, 10 aa, SARS coronavirus
NLDVIISSIV

SEQ ID NO: 9100 - protein, 10 aa, SARS coronavirus
WNLDVIISSI

SEQ ID NO: 9101 - protein, 10 aa, SARS coronavirus
SIVRQLFKPL

SEQ ID NO: 9102 - protein, 10 aa, SARS coronavirus
FQVTIAEILI

SEQ ID NO: 9103 - protein, 10 aa, SARS coronavirus
TIAEILIIIM

SEQ ID NO: 9104 - protein, 10 aa, SARS coronavirus
ELDDEEPMEL

SEQ ID NO: 9105 - protein, 10 aa, SARS coronavirus
VIISSIVRQL

SEQ ID NO: 9106 - protein, 10 aa, SARS coronavirus
QVTIAEILII

SEQ ID NO: 9107 - protein, 10 aa, SARS coronavirus
PLTKKNYSEL

SEQ ID NO: 9108 - protein, 10 aa, SARS coronavirus
RIAIWNLDVI

SEQ ID NO: 9109 - protein, 10 aa, SARS coronavirus
HLVDFQVTIA

SEQ ID NO: 9110 - protein, 9 aa, SARS coronavirus
RQLFKPLTK

SEQ ID NO: 9111 - protein, 9 aa, SARS coronavirus
QLFKPLTKK

SEQ ID NO: 9112 - protein, 10 aa, SARS coronavirus
RQLFKPLTKK

SEQ ID NO: 9113 - protein, 9 aa, SARS coronavirus
IVRQLFKPL

SEQ ID NO: 9114 - protein, 9 aa, SARS coronavirus
IMRTFRIAI

SEQ ID NO: 9115 - protein, 9 aa, SARS coronavirus
FQVTIAEIL

SEQ ID NO: 9116 - protein, 9 aa, SARS coronavirus
TFRIAIWNL

SEQ ID NO: 9117 - protein, 9 aa, SARS coronavirus
IISSIVRQL

SEQ ID NO: 9118 - protein, 9 aa, SARS coronavirus
LTKKNYSEL

SEQ ID NO: 9119 - protein, 9 aa, SARS coronavirus
QVTIAEILI

SEQ ID NO: 9120 - protein, 9 aa, SARS coronavirus
IAIWNLDVI

SEQ ID NO: 9121 - protein, 9 aa, SARS coronavirus
AIWNLDVII

SEQ ID NO: 9122 - protein, 9 aa, SARS coronavirus
IAEILIIIM

SEQ ID NO: 9123 - protein, 10 aa, SARS coronavirus
IVRQLFKPLT

SEQ ID NO: 9124 - protein, 10 aa, SARS coronavirus
RTFRIAIWNL

SEQ ID NO: 9125 - protein, 10 aa, SARS coronavirus
VIISSIVRQL

SEQ ID NO: 9126 - protein, 10 aa, SARS coronavirus
SIVRQLFKPL

SEQ ID NO: 9127 - protein, 10 aa, SARS coronavirus
QVTIAEILII

SEQ ID NO: 9128 - protein, 10 aa, SARS coronavirus
IIMRTFRIAI

SEQ ID NO: 9129 - protein, 10 aa, SARS coronavirus
IAIWNLDVII

SEQ ID NO: 9130 - protein, 10 aa, SARS coronavirus
ELDDEEPMEL

SEQ ID NO: 9131 - protein, 10 aa, SARS coronavirus
TIAEILIIIM

SEQ ID NO: 9132 - protein, 9 aa, SARS coronavirus
CADGTRHTY

SEQ ID NO: 9133 - protein, 9 aa, SARS coronavirus
SVSPKLFIR

SEQ ID NO: 9134 - protein, 9 aa, SARS coronavirus
QQELYSPLF

SEQ ID NO: 9135 - protein, 9 aa, SARS coronavirus
FTSCELYHY

SEQ ID NO: 9136 - protein, 9 aa, SARS coronavirus
QEEVQQELY

SEQ ID NO: 9137 - protein, 9 aa, SARS coronavirus
LADNKFALT

SEQ ID NO: 9138 - protein, 9 aa, SARS coronavirus
ILFLTLIVF

SEQ ID NO: 9139 - protein, 9 aa, SARS coronavirus
IVFTSCELY

SEQ ID NO: 9140 - protein, 9 aa, SARS coronavirus
TCTSTHFAF

SEQ ID NO: 9141 - protein, 9 aa, SARS coronavirus
FLIVAALVF

SEQ ID NO: 9142 - protein, 9 aa, SARS coronavirus
ALVFLILCF

SEQ ID NO: 9143 - protein, 9 aa, SARS coronavirus
LILCFTIKR

SEQ ID NO: 9144 - protein, 10 aa, SARS coronavirus
LKEPCPSGTY

SEQ ID NO: 9145 - protein, 10 aa, SARS coronavirus
RQEEVQQELY

SEQ ID NO: 9146 - protein, 10 aa, SARS coronavirus
LADNKFALTC

SEQ ID NO: 9147 - protein, 10 aa, SARS coronavirus
LTCTSTHFAF

SEQ ID NO: 9148 - protein, 10 aa, SARS coronavirus
SCELYHYQEC

SEQ ID NO: 9149 - protein, 10 aa, SARS coronavirus
RSVSPKLFIR

SEQ ID NO: 9150 - protein, 10 aa, SARS coronavirus
QQELYSPLFL

SEQ ID NO: 9151 - protein, 10 aa, SARS coronavirus
IILFLTLIVF

SEQ ID NO: 9152 - protein, 10 aa, SARS coronavirus
LIVFTSCELY

SEQ ID NO: 9153 - protein, 10 aa, SARS coronavirus
ACADGTRHTY

SEQ ID NO: 9154 - protein, 10 aa, SARS coronavirus
CADGTRHTYQ

SEQ ID NO: 9155 - protein, 10 aa, SARS coronavirus
SVSPKLFIRQ

SEQ ID NO: 9156 - protein, 10 aa, SARS coronavirus
AALVFLILCF

SEQ ID NO: 9157 - protein, 10 aa, SARS coronavirus
FLILCFTIKR

SEQ ID NO: 9158 - protein, 9 aa, SARS coronavirus
FLILCFTIK

SEQ ID NO: 9159 - protein, 9 aa, SARS coronavirus
ILFLTLIVF

SEQ ID NO: 9160 - protein, 9 aa, SARS coronavirus
ILCFTIKRK

SEQ ID NO: 9161 - protein, 9 aa, SARS coronavirus
ALVFLILCF

SEQ ID NO: 9162 - protein, 9 aa, SARS coronavirus
ELYSPLFLI

SEQ ID NO: 9163 - protein, 9 aa, SARS coronavirus
FLIVAALVF

SEQ ID NO: 9164 - protein, 9 aa, SARS coronavirus
LILCFTIKR

SEQ ID NO: 9165 - protein, 9 aa, SARS coronavirus
KLFIRQEEV

SEQ ID NO: 9166 - protein, 9 aa, SARS coronavirus
SVSPKLFIR

SEQ ID NO: 9167 - protein, 9 aa, SARS coronavirus
GTYEGNSPF

SEQ ID NO: 9168 - protein, 9 aa, SARS coronavirus
IVFTSCELY

SEQ ID NO: 9169 - protein, 9 aa, SARS coronavirus
ALTCTSTHF

SEQ ID NO: 9170 - protein, 9 aa, SARS coronavirus
PLFLIVAAL

SEQ ID NO: 9171 - protein, 9 aa, SARS coronavirus
KIILFLTLI

SEQ ID NO: 9172 - protein, 9 aa, SARS coronavirus
FTSCELYHY

SEQ ID NO: 9173 - protein, 9 aa, SARS coronavirus
ELYHYQECV

SEQ ID NO: 9174 - protein, 9 aa, SARS coronavirus
GTRHTYQLR

SEQ ID NO: 9175 - protein, 9 aa, SARS coronavirus
FLTLIVFTS

SEQ ID NO: 9176 - protein, 9 aa, SARS coronavirus
IVAALVFLI

SEQ ID NO: 9177 - protein, 10 aa, SARS coronavirus
QLRARSVSPK

SEQ ID NO: 9178 - protein, 10 aa, SARS coronavirus
FLILCFTIKR

SEQ ID NO: 9179 - protein, 10 aa, SARS coronavirus
CVRGTTVLLK

SEQ ID NO: 9180 - protein, 10 aa, SARS coronavirus
ELYHYQECVR

SEQ ID NO: 9181 - protein, 10 aa, SARS coronavirus
LILCFTIKRK

SEQ ID NO: 9182 - protein, 10 aa, SARS coronavirus
ELYSPLFLIV

SEQ ID NO: 9183 - protein, 10 aa, SARS coronavirus
FLIVAALVFL

SEQ ID NO: 9184 - protein, 10 aa, SARS coronavirus
SPFHPLADNK

SEQ ID NO: 9185 - protein, 10 aa, SARS coronavirus
IILFLTLIVF

SEQ ID NO: 9186 - protein, 10 aa, SARS coronavirus
FLTLIVFTSC

SEQ ID NO: 9187 - protein, 10 aa, SARS coronavirus
TLIVFTSCEL

SEQ ID NO: 9188 - protein, 10 aa, SARS coronavirus
LVFLILCFTI

SEQ ID NO: 9189 - protein, 10 aa, SARS coronavirus
LIVAALVFLI

SEQ ID NO: 9190 - protein, 10 aa, SARS coronavirus
ILFLTLIVFT

SEQ ID NO: 9191 - protein, 10 aa, SARS coronavirus
LIVFTSCELY

SEQ ID NO: 9192 - protein, 10 aa, SARS coronavirus
IVAALVFLIL

SEQ ID NO: 9193 - protein, 9 aa, SARS coronavirus
RQEEVQQEL

SEQ ID NO: 9194 - protein, 9 aa, SARS coronavirus
RARSVSPKL

SEQ ID NO: 9195 - protein, 9 aa, SARS coronavirus
HYQECVRGT

SEQ ID NO: 9196 - protein, 9 aa, SARS coronavirus
VFLILCFTI

SEQ ID NO: 9197 - protein, 9 aa, SARS coronavirus
VQQELYSPL

SEQ ID NO: 9198 - protein, 9 aa, SARS coronavirus
LYSPLFLIV

SEQ ID NO: 9199 - protein, 9 aa, SARS coronavirus
TYQLRARSV

SEQ ID NO: 9200 - protein, 9 aa, SARS coronavirus
EGNSPFHPL

SEQ ID NO: 9201 - protein, 9 aa, SARS coronavirus
VAALVFLIL

SEQ ID NO: 9202 - protein, 9 aa, SARS coronavirus
LIVFTSCEL

SEQ ID NO: 9203 - protein, 9 aa, SARS coronavirus
ECVRGTTVL

SEQ ID NO: 9204 - protein, 9 aa, SARS coronavirus
LIVAALVFL

SEQ ID NO: 9205 - protein, 9 aa, SARS coronavirus
CVRGTTVLL

SEQ ID NO: 9206 - protein, 9 aa, SARS coronavirus
DGTRHTYQL

SEQ ID NO: 9207 - protein, 9 aa, SARS coronavirus
ALVFLILCF

SEQ ID NO: 9208 - protein, 9 aa, SARS coronavirus
KIILFLTLI

SEQ ID NO: 9209 - protein, 9 aa, SARS coronavirus
RSVSPKLFI

SEQ ID NO: 9210 - protein, 9 aa, SARS coronavirus
QQELYSPLF

SEQ ID NO: 9211 - protein, 9 aa, SARS coronavirus
FLIVAALVF

SEQ ID NO: 9212 - protein, 9 aa, SARS coronavirus
GTYEGNSPF

SEQ ID NO: 9213 - protein, 10 aa, SARS coronavirus
LFLIVAALVF

SEQ ID NO: 9214 - protein, 10 aa, SARS coronavirus
HYQECVRGTT

SEQ ID NO: 9215 - protein, 10 aa, SARS coronavirus
SPLFLIVAAL

SEQ ID NO: 9216 - protein, 10 aa, SARS coronavirus
TYQLRARSVS

SEQ ID NO: 9217 - protein, 10 aa, SARS coronavirus
EVQQELYSPL

SEQ ID NO: 9218 - protein, 10 aa, SARS coronavirus
IVAALVFLIL

SEQ ID NO: 9219 - protein, 10 aa, SARS coronavirus
TLIVFTSCEL

SEQ ID NO: 9220 - protein, 10 aa, SARS coronavirus
ECVRGTTVLL

SEQ ID NO: 9221 - protein, 10 aa, SARS coronavirus
HPLADNKFAL

SEQ ID NO: 9222 - protein, 10 aa, SARS coronavirus
QQELYSPLFL

SEQ ID NO: 9223 - protein, 10 aa, SARS coronavirus
LYSPLFLIVA

SEQ ID NO: 9224 - protein, 10 aa, SARS coronavirus
FLIVAALVFL

SEQ ID NO: 9225 - protein, 10 aa, SARS coronavirus
RARSVSPKLF

SEQ ID NO: 9226 - protein, 10 aa, SARS coronavirus
VQQELYSPLF

SEQ ID NO: 9227 - protein, 10 aa, SARS coronavirus
AALVFLILCF

SEQ ID NO: 9228 - protein, 10 aa, SARS coronavirus
IILFLTLIVF

SEQ ID NO: 9229 - protein, 10 aa, SARS coronavirus
FALTCTSTHF

SEQ ID NO: 9230 - protein, 10 aa, SARS coronavirus
SGTYEGNSPF

SEQ ID NO: 9231 - protein, 10 aa, SARS coronavirus
LTCTSTHFAF

SEQ ID NO: 9232 - protein, 10 aa, SARS coronavirus
LIVAALVFLI

SEQ ID NO: 9233 - protein, 9 aa, SARS coronavirus
KLFIRQEEV

SEQ ID NO: 9234 - protein, 9 aa, SARS coronavirus
LIVAALVFL

SEQ ID NO: 9235 - protein, 9 aa, SARS coronavirus
LVFLILCFT

SEQ ID NO: 9236 - protein, 9 aa, SARS coronavirus
KIILFLTLI

SEQ ID NO: 9237 - protein, 9 aa, SARS coronavirus
ELYSPLFLI

SEQ ID NO: 9238 - protein, 9 aa, SARS coronavirus
IILFLTLIV

SEQ ID NO: 9239 - protein, 9 aa, SARS coronavirus
VQQELYSPL

SEQ ID NO: 9240 - protein, 9 aa, SARS coronavirus
IVAALVFLI

SEQ ID NO: 9241 - protein, 9 aa, SARS coronavirus
PLADNKFAL

SEQ ID NO: 9242 - protein, 9 aa, SARS coronavirus
QELYSPLFL

SEQ ID NO: 9243 - protein, 9 aa, SARS coronavirus
ELYHYQECV

SEQ ID NO: 9244 - protein, 9 aa, SARS coronavirus
LIVFTSCEL

SEQ ID NO: 9245 - protein, 9 aa, SARS coronavirus
FLTLIVFTS

SEQ ID NO: 9246 - protein, 9 aa, SARS coronavirus
PLFLIVAAL

SEQ ID NO: 9247 - protein, 9 aa, SARS coronavirus
AALVFLILC

SEQ ID NO: 9248 - protein, 9 aa, SARS coronavirus
QECVRGTTV

SEQ ID NO: 9249 - protein, 9 aa, SARS coronavirus
FAFACADGT

SEQ ID NO: 9250 - protein, 9 aa, SARS coronavirus
LTLIVFTSC

SEQ ID NO: 9251 - protein, 9 aa, SARS coronavirus
CTSTHFAFA

SEQ ID NO: 9252 - protein, 9 aa, SARS coronavirus
TSTHFAFAC

SEQ ID NO: 9253 - protein, 10 aa, SARS coronavirus
FLIVAALVFL

SEQ ID NO: 9254 - protein, 10 aa, SARS coronavirus
ILFLTLIVFT

SEQ ID NO: 9255 - protein, 10 aa, SARS coronavirus
ALVFLILCFT

SEQ ID NO: 9256 - protein, 10 aa, SARS coronavirus
FLTLIVFTSC

SEQ ID NO: 9257 - protein, 10 aa, SARS coronavirus
LVFLILCFTI

SEQ ID NO: 9258 - protein, 10 aa, SARS coronavirus
LIVAALVFLI

SEQ ID NO: 9259 - protein, 10 aa, SARS coronavirus
ALTCTSTHFA

SEQ ID NO: 9260 - protein, 10 aa, SARS coronavirus
TLIVFTSCEL

SEQ ID NO: 9261 - protein, 10 aa, SARS coronavirus
KIILFLTLIV

SEQ ID NO: 9262 - protein, 10 aa, SARS coronavirus
ELYSPLFLIV

SEQ ID NO: 9263 - protein, 10 aa, SARS coronavirus
QELYSPLFLI

SEQ ID NO: 9264 - protein, 10 aa, SARS coronavirus
PLFLIVAALV

SEQ ID NO: 9265 - protein, 10 aa, SARS coronavirus
YEGNSPFHPL

SEQ ID NO: 9266 - protein, 10 aa, SARS coronavirus
ILCFTIKRKT

SEQ ID NO: 9267 - protein, 10 aa, SARS coronavirus
IVAALVFLIL

SEQ ID NO: 9268 - protein, 10 aa, SARS coronavirus
CELYHYQECV

SEQ ID NO: 9269 - protein, 10 aa, SARS coronavirus
YQECVRGTTV

SEQ ID NO: 9270 - protein, 10 aa, SARS coronavirus
LLKEPCPSGT

SEQ ID NO: 9271 - protein, 10 aa, SARS coronavirus
CTSTHFAFAC

SEQ ID NO: 9272 - protein, 10 aa, SARS coronavirus
PLADNKFALT

SEQ ID NO: 9273 - protein, 9 aa, SARS coronavirus
SVSPKLFIR

SEQ ID NO: 9274 - protein, 9 aa, SARS coronavirus
GTRHTYQLR

SEQ ID NO: 9275 - protein, 9 aa, SARS coronavirus
FLILCFTIK

SEQ ID NO: 9276 - protein, 10 aa, SARS coronavirus
CVRGTTVLLK

SEQ ID NO: 9277 - protein, 9 aa, SARS coronavirus
CVRGTTVLL

SEQ ID NO: 9278 - protein, 9 aa, SARS coronavirus
RARSVSPKL

SEQ ID NO: 9279 - protein, 9 aa, SARS coronavirus
VAALVFLIL

SEQ ID NO: 9280 - protein, 9 aa, SARS coronavirus
EGNSPFHPL

SEQ ID NO: 9281 - protein, 9 aa, SARS coronavirus
LIVFTSCEL

SEQ ID NO: 9282 - protein, 9 aa, SARS coronavirus
ECVRGTTVL

SEQ ID NO: 9283 - protein, 9 aa, SARS coronavirus
DGTRHTYQL

SEQ ID NO: 9284 - protein, 9 aa, SARS coronavirus
VQQELYSPL

SEQ ID NO: 9285 - protein, 9 aa, SARS coronavirus
LIVAALVFL

SEQ ID NO: 9286 - protein, 9 aa, SARS coronavirus
HPLADNKFA

SEQ ID NO: 9287 - protein, 9 aa, SARS coronavirus
SPLFLIVAA

SEQ ID NO: 9288 - protein, 9 aa, SARS coronavirus
IVAALVFLI

SEQ ID NO: 9289 - protein, 9 aa, SARS coronavirus
RQEEVQQEL

SEQ ID NO: 9290 - protein, 9 aa, SARS coronavirus
AALVFLILC

SEQ ID NO: 9291 - protein, 9 aa, SARS coronavirus
SPFHPLADN

SEQ ID NO: 9292 - protein, 9 aa, SARS coronavirus
RSVSPKLFI

SEQ ID NO: 9293 - protein, 9 aa, SARS coronavirus
ELYSPLFLI

SEQ ID NO: 9294 - protein, 9 aa, SARS coronavirus
LVFLILCFT

SEQ ID NO: 9295 - protein, 10 aa, SARS coronavirus
HPLADNKFAL

SEQ ID NO: 9296 - protein, 10 aa, SARS coronavirus
SPLFLIVAAL

SEQ ID NO: 9297 - protein, 10 aa, SARS coronavirus
EVQQELYSPL

SEQ ID NO: 9298 - protein, 10 aa, SARS coronavirus
IVAALVFLIL

SEQ ID NO: 9299 - protein, 10 aa, SARS coronavirus
TLIVFTSCEL

SEQ ID NO: 9300 - protein, 10 aa, SARS coronavirus
ECVRGTTVLL

SEQ ID NO: 9301 - protein, 10 aa, SARS coronavirus
FLIVAALVFL

SEQ ID NO: 9302 - protein, 10 aa, SARS coronavirus
LVFLILCFTI

SEQ ID NO: 9303 - protein, 10 aa, SARS coronavirus
ADGTRHTYQL

SEQ ID NO: 9304 - protein, 10 aa, SARS coronavirus
QQELYSPLFL

SEQ ID NO: 9305 - protein, 10 aa, SARS coronavirus
GTRHTYQLRA

SEQ ID NO: 9306 - protein, 10 aa, SARS coronavirus
YEGNSPFHPL

SEQ ID NO: 9307 - protein, 10 aa, SARS coronavirus
RARSVSPKLF

SEQ ID NO: 9308 - protein, 10 aa, SARS coronavirus
CVRGTTVLLK

SEQ ID NO: 9309 - protein, 9 aa, SARS coronavirus
MNELTLIDF

SEQ ID NO: 9310 - protein, 9 aa, SARS coronavirus
DLEEPCTKV

SEQ ID NO: 9311 - protein, 9 aa, SARS coronavirus
TLIDFYLCF

SEQ ID NO: 9312 - protein, 9 aa, SARS coronavirus
LIDFYLCFL

SEQ ID NO: 9313 - protein, 9 aa, SARS coronavirus
LCFLAFLLF

SEQ ID NO: 9314 - protein, 9 aa, SARS coronavirus
LVLIMLIIF

SEQ ID NO: 9315 - protein, 9 aa, SARS coronavirus
LIMLIIFWF

SEQ ID NO: 9316 - protein, 10 aa, SARS coronavirus
MNELTLIDFY

SEQ ID NO: 9317 - protein, 10 aa, SARS coronavirus
LIDFYLCFLA

SEQ ID NO: 9318 - protein, 10 aa, SARS coronavirus
IQDLEEPCTK

SEQ ID NO: 9319 - protein, 10 aa, SARS coronavirus
LTLIDFYLCF

SEQ ID NO: 9320 - protein, 10 aa, SARS coronavirus
YLCFLAFLLF

SEQ ID NO: 9321 - protein, 10 aa, SARS coronavirus
FLVLIMLIIF

SEQ ID NO: 9322 - protein, 10 aa, SARS coronavirus
VLIMLIIFWF

SEQ ID NO: 9323 - protein, 9 aa, SARS coronavirus
TLIDFYLCF

SEQ ID NO: 9324 - protein, 9 aa, SARS coronavirus
LLFLVLIML

SEQ ID NO: 9325 - protein, 9 aa, SARS coronavirus
MLIIFWFSL

SEQ ID NO: 9326 - protein, 9 aa, SARS coronavirus
FLVLIMLII

SEQ ID NO: 9327 - protein, 9 aa, SARS coronavirus
LIMLIIFWF

SEQ ID NO: 9328 - protein, 9 aa, SARS coronavirus
YLCFLAFLL

SEQ ID NO: 9329 - protein, 9 aa, SARS coronavirus
FLLFLVLIM

SEQ ID NO: 9330 - protein, 9 aa, SARS coronavirus
IIFWFSLEI

SEQ ID NO: 9331 - protein, 9 aa, SARS coronavirus
FLAFLLFLV

SEQ ID NO: 9332 - protein, 9 aa, SARS coronavirus
LVLIMLIIF

SEQ ID NO: 9333 - protein, 9 aa, SARS coronavirus
VLIMLIIFW

SEQ ID NO: 9334 - protein, 9 aa, SARS coronavirus
ELTLIDFYL

SEQ ID NO: 9335 - protein, 9 aa, SARS coronavirus
IMLIIFWFS

SEQ ID NO: 9336 - protein, 9 aa, SARS coronavirus
LCFLAFLLF

SEQ ID NO: 9337 - protein, 10 aa, SARS coronavirus
VLIMLIIFWF

SEQ ID NO: 9338 - protein, 10 aa, SARS coronavirus
YLCFLAFLLF

SEQ ID NO: 9339 - protein, 10 aa, SARS coronavirus
LLFLVLIMLI

SEQ ID NO: 9340 - protein, 10 aa, SARS coronavirus
FLVLIMLIIF

SEQ ID NO: 9341 - protein, 10 aa, SARS coronavirus
IMLIIFWFSL

SEQ ID NO: 9342 - protein, 10 aa, SARS coronavirus
TLIDFYLCFL

SEQ ID NO: 9343 - protein, 10 aa, SARS coronavirus
FLLFLVLIML

SEQ ID NO: 9344 - protein, 10 aa, SARS coronavirus
FLAFLLFLVL

SEQ ID NO: 9345 - protein, 10 aa, SARS coronavirus
LTLIDFYLCF

SEQ ID NO: 9346 - protein, 10 aa, SARS coronavirus
IQDLEEPCTK

SEQ ID NO: 9347 - protein, 10 aa, SARS coronavirus
ELTLIDFYLC

SEQ ID NO: 9348 - protein, 10 aa, SARS coronavirus
LIIFWFSLEI

SEQ ID NO: 9349 - protein, 9 aa, SARS coronavirus
FYLCFLAFL

SEQ ID NO: 9350 - protein, 9 aa, SARS coronavirus
CFLAFLLFL

SEQ ID NO: 9351 - protein, 9 aa, SARS coronavirus
WFSLEIQDL

SEQ ID NO: 9352 - protein, 9 aa, SARS coronavirus
DFYLCFLAF

SEQ ID NO: 9353 - protein, 9 aa, SARS coronavirus
LFLVLIMLI

SEQ ID NO: 9354 - protein, 9 aa, SARS coronavirus
AFLLFLVLI

SEQ ID NO: 9355 - protein, 9 aa, SARS coronavirus
MLIIFWFSL

SEQ ID NO: 9356 - protein, 9 aa, SARS coronavirus
LAFLLFLVL

SEQ ID NO: 9357 - protein, 9 aa, SARS coronavirus
ELTLIDFYL

SEQ ID NO: 9358 - protein, 9 aa, SARS coronavirus
LLFLVLIML

SEQ ID NO: 9359 - protein, 9 aa, SARS coronavirus
YLCFLAFLL

SEQ ID NO: 9360 - protein, 9 aa, SARS coronavirus
LIMLIIFWF

SEQ ID NO: 9361 - protein, 9 aa, SARS coronavirus
LIDFYLCFL

SEQ ID NO: 9362 - protein, 9 aa, SARS coronavirus
TLIDFYLCF

SEQ ID NO: 9363 - protein, 9 aa, SARS coronavirus
MNELTLIDF

SEQ ID NO: 9364 - protein, 9 aa, SARS coronavirus
LVLIMLIIF

SEQ ID NO: 9365 - protein, 9 aa, SARS coronavirus
LCFLAFLLF

SEQ ID NO: 9366 - protein, 9 aa, SARS coronavirus
FLVLIMLII

SEQ ID NO: 9367 - protein, 9 aa, SARS coronavirus
IIFWFSLEI

SEQ ID NO: 9368 - protein, 9 aa, SARS coronavirus
FLLFLVLIM

SEQ ID NO: 9369 - protein, 10 aa, SARS coronavirus
FYLCFLAFLL

SEQ ID NO: 9370 - protein, 10 aa, SARS coronavirus
DFYLCFLAFL

SEQ ID NO: 9371 - protein, 10 aa, SARS coronavirus
LFLVLIMLII

SEQ ID NO: 9372 - protein, 10 aa, SARS coronavirus
FLLFLVLIML

SEQ ID NO: 9373 - protein, 10 aa, SARS coronavirus
TLIDFYLCFL

SEQ ID NO: 9374 - protein, 10 aa, SARS coronavirus
IMLIIFWFSL

SEQ ID NO: 9375 - protein, 10 aa, SARS coronavirus
FLAFLLFLVL

SEQ ID NO: 9376 - protein, 10 aa, SARS coronavirus
FWFSLEIQDL

SEQ ID NO: 9377 - protein, 10 aa, SARS coronavirus
AFLLFLVLIM

SEQ ID NO: 9378 - protein, 10 aa, SARS coronavirus
VLIMLIIFWF

SEQ ID NO: 9379 - protein, 10 aa, SARS coronavirus
LCFLAFLLFL

SEQ ID NO: 9380 - protein, 10 aa, SARS coronavirus
LTLIDFYLCF

SEQ ID NO: 9381 - protein, 10 aa, SARS coronavirus
FLVLIMLIIF

SEQ ID NO: 9382 - protein, 10 aa, SARS coronavirus
YLCFLAFLLF

SEQ ID NO: 9383 - protein, 10 aa, SARS coronavirus
LIIFWFSLEI

SEQ ID NO: 9384 - protein, 10 aa, SARS coronavirus
LLFLVLIMLI

SEQ ID NO: 9385 - protein, 10 aa, SARS coronavirus
LAFLLFLVLI

SEQ ID NO: 9386 - protein, 10 aa, SARS coronavirus
CFLAFLLFLV

SEQ ID NO: 9387 - protein, 10 aa, SARS coronavirus
NELTLIDFYL

SEQ ID NO: 9388 - protein, 9 aa, SARS coronavirus
FLAFLLFLV

SEQ ID NO: 9389 - protein, 9 aa, SARS coronavirus
MLIIFWFSL

SEQ ID NO: 9390 - protein, 9 aa, SARS coronavirus
YLCFLAFLL

SEQ ID NO: 9391 - protein, 9 aa, SARS coronavirus
LLFLVLIML

SEQ ID NO: 9392 - protein, 9 aa, SARS coronavirus
FLLFLVLIM

SEQ ID NO: 9393 - protein, 9 aa, SARS coronavirus
ELTLIDFYL

SEQ ID NO: 9394 - protein, 9 aa, SARS coronavirus
FLVLIMLII

SEQ ID NO: 9395 - protein, 9 aa, SARS coronavirus
IIFWFSLEI

SEQ ID NO: 9396 - protein, 9 aa, SARS coronavirus
IMLIIFWFS

SEQ ID NO: 9397 - protein, 9 aa, SARS coronavirus
LIDFYLCFL

SEQ ID NO: 9398 - protein, 9 aa, SARS coronavirus
LIMLIIFWF

SEQ ID NO: 9399 - protein, 9 aa, SARS coronavirus
CFLAFLLFL

SEQ ID NO: 9400 - protein, 9 aa, SARS coronavirus
FYLCFLAFL

SEQ ID NO: 9401 - protein, 9 aa, SARS coronavirus
TLIDFYLCF

SEQ ID NO: 9402 - protein, 9 aa, SARS coronavirus
VLIMLIIFW

SEQ ID NO: 9403 - protein, 9 aa, SARS coronavirus
LAFLLFLVL

SEQ ID NO: 9404 - protein, 9 aa, SARS coronavirus
DLEEPCTKV

SEQ ID NO: 9405 - protein, 9 aa, SARS coronavirus
LTLIDFYLC

SEQ ID NO: 9406 - protein, 9 aa, SARS coronavirus
IQDLEEPCT

SEQ ID NO: 9407 - protein, 10 aa, SARS coronavirus
IMLIIFWFSL

SEQ ID NO: 9408 - protein, 10 aa, SARS coronavirus
TLIDFYLCFL

SEQ ID NO: 9409 - protein, 10 aa, SARS coronavirus
FLLFLVLIML

SEQ ID NO: 9410 - protein, 10 aa, SARS coronavirus
LLFLVLIMLI

SEQ ID NO: 9411 - protein, 10 aa, SARS coronavirus
FLAFLLFLVL

SEQ ID NO: 9412 - protein, 10 aa, SARS coronavirus
NELTLIDFYL

SEQ ID NO: 9413 - protein, 10 aa, SARS coronavirus
LCFLAFLLFL

SEQ ID NO: 9414 - protein, 10 aa, SARS coronavirus
VLIMLIIFWF

SEQ ID NO: 9415 - protein, 10 aa, SARS coronavirus
LIIFWFSLEI

SEQ ID NO: 9416 - protein, 10 aa, SARS coronavirus
LAFLLFLVLI

SEQ ID NO: 9417 - protein, 10 aa, SARS coronavirus
LIMLIIFWFS

SEQ ID NO: 9418 - protein, 10 aa, SARS coronavirus
LIDFYLCFLA

SEQ ID NO: 9419 - protein, 10 aa, SARS coronavirus
CFLAFLLFLV

SEQ ID NO: 9420 - protein, 10 aa, SARS coronavirus
QDLEEPCTKV

SEQ ID NO: 9421 - protein, 10 aa, SARS coronavirus
ELTLIDFYLC

SEQ ID NO: 9422 - protein, 10 aa, SARS coronavirus
YLCFLAFLLF

SEQ ID NO: 9423 - protein, 10 aa, SARS coronavirus
LVLIMLIIFW

SEQ ID NO: 9424 - protein, 10 aa, SARS coronavirus
IQDLEEPCTK

SEQ ID NO: 9425 - protein, 9 aa, SARS coronavirus
LAFLLFLVL

SEQ ID NO: 9426 - protein, 9 aa, SARS coronavirus
ELTLIDFYL

SEQ ID NO: 9427 - protein, 9 aa, SARS coronavirus
YLCFLAFLL

SEQ ID NO: 9428 - protein, 9 aa, SARS coronavirus
LLFLVLIML

SEQ ID NO: 9429 - protein, 9 aa, SARS coronavirus
MLIIFWFSL

SEQ ID NO: 9430 - protein, 9 aa, SARS coronavirus
LIDFYLCFL

SEQ ID NO: 9431 - protein, 9 aa, SARS coronavirus
FLLFLVLIM

SEQ ID NO: 9432 - protein, 10 aa, SARS coronavirus
TLIDFYLCFL

SEQ ID NO: 9433 - protein, 10 aa, SARS coronavirus
LCFLAFLLFL

SEQ ID NO: 9434 - protein, 10 aa, SARS coronavirus
FLAFLLFLVL

SEQ ID NO: 9435 - protein, 10 aa, SARS coronavirus
FLLFLVLIML

SEQ ID NO: 9436 - protein, 10 aa, SARS coronavirus
IMLIIFWFSL

SEQ ID NO: 9437 - protein, 10 aa, SARS coronavirus
LAFLLFLVLI

SEQ ID NO: 9438 - protein, 9 aa, SARS coronavirus
CQDPAGGAL

SEQ ID NO: 9439 - protein, 9 aa, SARS coronavirus
CALGKVLPF

SEQ ID NO: 9440 - protein, 9 aa, SARS coronavirus
GALIARCWY

SEQ ID NO: 9441 - protein, 10 aa, SARS coronavirus
STAWLCALGK

SEQ ID NO: 9442 - protein, 10 aa, SARS coronavirus
FRDVLVVLNK

SEQ ID NO: 9443 - protein, 10 aa, SARS coronavirus
CQDPAGGALI

SEQ ID NO: 9444 - protein, 10 aa, SARS coronavirus
LHEGHQTAAF

SEQ ID NO: 9445 - protein, 10 aa, SARS coronavirus
LCALGKVLPF

SEQ ID NO: 9446 - protein, 10 aa, SARS coronavirus
TCTPNVTINC

SEQ ID NO: 9447 - protein, 9 aa, SARS coronavirus
ALIARCWYL

SEQ ID NO: 9448 - protein, 9 aa, SARS coronavirus
TAWLCALGK

SEQ ID NO: 9449 - protein, 9 aa, SARS coronavirus
KILVRYNTR

SEQ ID NO: 9450 - protein, 10 aa, SARS coronavirus
ALGKVLPFHR

SEQ ID NO: 9451 - protein, 10 aa, SARS coronavirus
STAWLCALGK

SEQ ID NO: 9452 - protein, 10 aa, SARS coronavirus
ALIARCWYLH

SEQ ID NO: 9453 - protein, 9 aa, SARS coronavirus
AFRDVLVVL

SEQ ID NO: 9454 - protein, 9 aa, SARS coronavirus
RYNTRGNTY

SEQ ID NO: 9455 - protein, 9 aa, SARS coronavirus
WYLHEGHQT

SEQ ID NO: 9456 - protein, 9 aa, SARS coronavirus
ALIARCWYL

SEQ ID NO: 9457 - protein, 9 aa, SARS coronavirus
TYSTAWLCA

SEQ ID NO: 9458 - protein, 9 aa, SARS coronavirus
WLCALGKVL

SEQ ID NO: 9459 - protein, 9 aa, SARS coronavirus
CQDPAGGAL

SEQ ID NO: 9460 - protein, 9 aa, SARS coronavirus
GNTYSTAWL

SEQ ID NO: 9461 - protein, 9 aa, SARS coronavirus
YSTAWLCAL

SEQ ID NO: 9462 - protein, 9 aa, SARS coronavirus
QTAAFRDVL

SEQ ID NO: 9463 - protein, 9 aa, SARS coronavirus
CALGKVLPF

SEQ ID NO: 9464 - protein, 9 aa, SARS coronavirus
QTCTPNVTI

SEQ ID NO: 9465 - protein, 9 aa, SARS coronavirus
LPFHRWHTM

SEQ ID NO: 9466 - protein, 10 aa, SARS coronavirus
TYSTAWLCAL

SEQ ID NO: 9467 - protein, 10 aa, SARS coronavirus
RYNTRGNTYS

SEQ ID NO: 9468 - protein, 10 aa, SARS coronavirus
RGNTYSTAWL

SEQ ID NO: 9469 - protein, 10 aa, SARS coronavirus
WYLHEGHQTA

SEQ ID NO: 9470 - protein, 10 aa, SARS coronavirus
AWLCALGKVL

SEQ ID NO: 9471 - protein, 10 aa, SARS coronavirus
NCQDPAGGAL

SEQ ID NO: 9472 - protein, 10 aa, SARS coronavirus
GALIARCWYL

SEQ ID NO: 9473 - protein, 10 aa, SARS coronavirus
AAFRDVLVVL

SEQ ID NO: 9474 - protein, 10 aa, SARS coronavirus
HQTAAFRDVL

SEQ ID NO: 9475 - protein, 10 aa, SARS coronavirus
LCALGKVLPF

SEQ ID NO: 9476 - protein, 10 aa, SARS coronavirus
CQDPAGGALI

SEQ ID NO: 9477 - protein, 10 aa, SARS coronavirus
VQTCTPNVTI

SEQ ID NO: 9478 - protein, 10 aa, SARS coronavirus
VLPFHRWHTM

SEQ ID NO: 9479 - protein, 10 aa, SARS coronavirus
AFRDVLVVLN

SEQ ID NO: 9480 - protein, 9 aa, SARS coronavirus
ALIARCWYL

SEQ ID NO: 9481 - protein, 9 aa, SARS coronavirus
VLPFHRWHT

SEQ ID NO: 9482 - protein, 9 aa, SARS coronavirus
YLHEGHQTA

SEQ ID NO: 9483 - protein, 9 aa, SARS coronavirus
WLCALGKVL

SEQ ID NO: 9484 - protein, 9 aa, SARS coronavirus
VLVVLNKRT

SEQ ID NO: 9485 - protein, 9 aa, SARS coronavirus
MVQTCTPNV

SEQ ID NO: 9486 - protein, 9 aa, SARS coronavirus
AAFRDVLVV

SEQ ID NO: 9487 - protein, 9 aa, SARS coronavirus
NTYSTAWLC

SEQ ID NO: 9488 - protein, 9 aa, SARS coronavirus
YSTAWLCAL

SEQ ID NO: 9489 - protein, 9 aa, SARS coronavirus
TAAFRDVLV

SEQ ID NO: 9490 - protein, 9 aa, SARS coronavirus
ALGKVLPFH

SEQ ID NO: 9491 - protein, 9 aa, SARS coronavirus
GNTYSTAWL

SEQ ID NO: 9492 - protein, 9 aa, SARS coronavirus
VQTCTPNVT

SEQ ID NO: 9493 - protein, 10 aa, SARS coronavirus
YLHEGHQTAA

SEQ ID NO: 9494 - protein, 10 aa, SARS coronavirus
KVLPFHRWHT

SEQ ID NO: 9495 - protein, 10 aa, SARS coronavirus
TMVQTCTPNV

SEQ ID NO: 9496 - protein, 10 aa, SARS coronavirus
GALIARCWYL

SEQ ID NO: 9497 - protein, 10 aa, SARS coronavirus
VLPFHRWHTM

SEQ ID NO: 9498 - protein, 10 aa, SARS coronavirus
LPFHRWHTMV

SEQ ID NO: 9499 - protein, 10 aa, SARS coronavirus
TAWLCALGKV

SEQ ID NO: 9500 - protein, 10 aa, SARS coronavirus
VQTCTPNVTI

SEQ ID NO: 9501 - protein, 10 aa, SARS coronavirus
AAFRDVLVVL

SEQ ID NO: 9502 - protein, 10 aa, SARS coronavirus
QTAAFRDVLV

SEQ ID NO: 9503 - protein, 10 aa, SARS coronavirus
TAAFRDVLVV

SEQ ID NO: 9504 - protein, 10 aa, SARS coronavirus
RGNTYSTAWL

SEQ ID NO: 9505 - protein, 9 aa, SARS coronavirus
TAWLCALGK

SEQ ID NO: 9506 - protein, 10 aa, SARS coronavirus
STAWLCALGK

SEQ ID NO: 9507 - protein, 9 aa, SARS coronavirus
LPFHRWHTM

SEQ ID NO: 9508 - protein, 9 aa, SARS coronavirus
ALIARCWYL

SEQ ID NO: 9509 - protein, 9 aa, SARS coronavirus
AFRDVLVVL

SEQ ID NO: 9510 - protein, 9 aa, SARS coronavirus
QTAAFRDVL

SEQ ID NO: 9511 - protein, 9 aa, SARS coronavirus
GNTYSTAWL

SEQ ID NO: 9512 - protein, 9 aa, SARS coronavirus
YSTAWLCAL

SEQ ID NO: 9513 - protein, 9 aa, SARS coronavirus
WLCALGKVL

SEQ ID NO: 9514 - protein, 9 aa, SARS coronavirus
DPAGGALIA

SEQ ID NO: 9515 - protein, 9 aa, SARS coronavirus
AAFRDVLVV

SEQ ID NO: 9516 - protein, 9 aa, SARS coronavirus
CQDPAGGAL

SEQ ID NO: 9517 - protein, 9 aa, SARS coronavirus
LVRYNTRGN

SEQ ID NO: 9518 - protein, 9 aa, SARS coronavirus
NTRGNTYST

SEQ ID NO: 9519 - protein, 9 aa, SARS coronavirus
MVQTCTPNV

SEQ ID NO: 9520 - protein, 9 aa, SARS coronavirus
QTCTPNVTI

SEQ ID NO: 9521 - protein, 9 aa, SARS coronavirus
TAAFRDVLV

SEQ ID NO: 9522 - protein, 10 aa, SARS coronavirus
AAFRDVLVVL

SEQ ID NO: 9523 - protein, 10 aa, SARS coronavirus
GALIARCWYL

SEQ ID NO: 9524 - protein, 10 aa, SARS coronavirus
LVRYNTRGNT

SEQ ID NO: 9525 - protein, 10 aa, SARS coronavirus
HQTAAFRDVL

SEQ ID NO: 9526 - protein, 10 aa, SARS coronavirus
RGNTYSTAWL

SEQ ID NO: 9527 - protein, 10 aa, SARS coronavirus
LPFHRWHTMV

SEQ ID NO: 9528 - protein, 10 aa, SARS coronavirus
NCQDPAGGAL

SEQ ID NO: 9529 - protein, 10 aa, SARS coronavirus
AWLCALGKVL

SEQ ID NO: 9530 - protein, 10 aa, SARS coronavirus
NTRGNTYSTA

SEQ ID NO: 9531 - protein, 10 aa, SARS coronavirus
VLPFHRWHTM

SEQ ID NO: 9532 - protein, 10 aa, SARS coronavirus
KVLPFHRWHT

SEQ ID NO: 9533 - protein, 10 aa, SARS coronavirus
TAWLCALGKV

SEQ ID NO: 9534 - protein, 10 aa, SARS coronavirus
VQTCTPNVTI

SEQ ID NO: 9535 - protein, 10 aa, SARS coronavirus
TAAFRDVLVV

SEQ ID NO: 9536 - protein, 10 aa, SARS coronavirus
MVQTCTPNVT

SEQ ID NO: 9537 - protein, 10 aa, SARS coronavirus
NVTINCQDPA

SEQ ID NO: 9538 - protein, 10 aa, SARS coronavirus
DVLVVLNKRT

SEQ ID NO: 9539 - protein, 9 aa, SARS coronavirus
PTEPKKDKK

SEQ ID NO: 9540 - protein, 9 aa, SARS coronavirus
AADMDDFSR

SEQ ID NO: 9541 - protein, 9 aa, SARS coronavirus
QLESKVSGK

SEQ ID NO: 9542 - protein, 9 aa, SARS coronavirus
ELSPRWYFY

SEQ ID NO: 9543 - protein, 9 aa, SARS coronavirus
KLDDKDPQF

SEQ ID NO: 9544 - protein, 9 aa, SARS coronavirus
AAEASKKPR

SEQ ID NO: 9545 - protein, 9 aa, SARS coronavirus
GPDDQIGYY

SEQ ID NO: 9546 - protein, 9 aa, SARS coronavirus
ASLPYGANK

SEQ ID NO: 9547 - protein, 9 aa, SARS coronavirus
KTFPPTEPK

SEQ ID NO: 9548 - protein, 9 aa, SARS coronavirus
GKEELRFPR

SEQ ID NO: 9549 - protein, 9 aa, SARS coronavirus
MKELSPRWY

SEQ ID NO: 9550 - protein, 9 aa, SARS coronavirus
GPEQTQGNF

SEQ ID NO: 9551 - protein, 9 aa, SARS coronavirus
STDNNQNGG

SEQ ID NO: 9552 - protein, 9 aa, SARS coronavirus
GTTLPKGFY

SEQ ID NO: 9553 - protein, 9 aa, SARS coronavirus
TTLPKGFYA

SEQ ID NO: 9554 - protein, 9 aa, SARS coronavirus
GTDYKHWPQ

SEQ ID NO: 9555 - protein, 9 aa, SARS coronavirus
YAEGSRGGS

SEQ ID NO: 9556 - protein, 9 aa, SARS coronavirus
MSDNGPQSN

SEQ ID NO: 9557 - protein, 9 aa, SARS coronavirus
ASAFFGMSR

SEQ ID NO: 9558 - protein, 9 aa, SARS coronavirus
SGPDDQIGY

SEQ ID NO: 9559 - protein, 10 aa, SARS coronavirus
GTGPEASLPY

SEQ ID NO: 9560 - protein, 10 aa, SARS coronavirus
ATEGALNTPK

SEQ ID NO: 9561 - protein, 10 aa, SARS coronavirus
PTEPKKDKKK

SEQ ID NO: 9562 - protein, 10 aa, SARS coronavirus
NSGPDDQIGY

SEQ ID NO: 9563 - protein, 10 aa, SARS coronavirus
ELSPRWYFYY

SEQ ID NO: 9564 - protein, 10 aa, SARS coronavirus
STDNNQNGGR

SEQ ID NO: 9565 - protein, 10 aa, SARS coronavirus
KLDDKDPQFK

SEQ ID NO: 9566 - protein, 10 aa, SARS coronavirus
KTFPPTEPKK

SEQ ID NO: 9567 - protein, 10 aa, SARS coronavirus
VTPSGTWLTY

SEQ ID NO: 9568 - protein, 10 aa, SARS coronavirus
KTDEAQPLPQ

SEQ ID NO: 9569 - protein, 10 aa, SARS coronavirus
GPDDQIGYYR

SEQ ID NO: 9570 - protein, 10 aa, SARS coronavirus
GTDYKHWPQI

SEQ ID NO: 9571 - protein, 10 aa, SARS coronavirus
FKDNVILLNK

SEQ ID NO: 9572 - protein, 10 aa, SARS coronavirus
EAQPLPQRQK

SEQ ID NO: 9573 - protein, 10 aa, SARS coronavirus
AAEASKKPRQ

SEQ ID NO: 9574 - protein, 10 aa, SARS coronavirus
GGETALALLL

SEQ ID NO: 9575 - protein, 10 aa, SARS coronavirus
QLPQGTTLPK

SEQ ID NO: 9576 - protein, 10 aa, SARS coronavirus
YAEGSRGGSQ

SEQ ID NO: 9577 - protein, 10 aa, SARS coronavirus
QLESKVSGKG

SEQ ID NO: 9578 - protein, 10 aa, SARS coronavirus
TDEAQPLPQR

SEQ ID NO: 9579 - protein, 9 aa, SARS coronavirus
QLESKVSGK

SEQ ID NO: 9580 - protein, 9 aa, SARS coronavirus
KTFPPTEPK

SEQ ID NO: 9581 - protein, 9 aa, SARS coronavirus
WLTYHGAIK

SEQ ID NO: 9582 - protein, 9 aa, SARS coronavirus
ALALLLLDR

SEQ ID NO: 9583 - protein, 9 aa, SARS coronavirus
KLDDKDPQF

SEQ ID NO: 9584 - protein, 9 aa, SARS coronavirus
LLNKHIDAY

SEQ ID NO: 9585 - protein, 9 aa, SARS coronavirus
ELSPRWYFY

SEQ ID NO: 9586 - protein, 9 aa, SARS coronavirus
LIRQGTDYK

SEQ ID NO: 9587 - protein, 9 aa, SARS coronavirus
QQGQTVTKK

SEQ ID NO: 9588 - protein, 9 aa, SARS coronavirus
DLIRQGTDY

SEQ ID NO: 9589 - protein, 9 aa, SARS coronavirus
GMSRIGMEV

SEQ ID NO: 9590 - protein, 9 aa, SARS coronavirus
LLLDRLNQL

SEQ ID NO: 9591 - protein, 9 aa, SARS coronavirus
KQYNVTQAF

SEQ ID NO: 9592 - protein, 9 aa, SARS coronavirus
FTALTQHGK

SEQ ID NO: 9593 - protein, 9 aa, SARS coronavirus
KMKELSPRW

SEQ ID NO: 9594 - protein, 9 aa, SARS coronavirus
ALNTPKDHI

SEQ ID NO: 9595 - protein, 9 aa, SARS coronavirus
QQQGQTVTK

SEQ ID NO: 9596 - protein, 9 aa, SARS coronavirus
ASLPYGANK

SEQ ID NO: 9597 - protein, 9 aa, SARS coronavirus
GLPNNTASW

SEQ ID NO: 9598 - protein, 9 aa, SARS coronavirus
LPQGTTLPK

SEQ ID NO: 9599 - protein, 10 aa, SARS coronavirus
KLDDKDPQFK

SEQ ID NO: 9600 - protein, 10 aa, SARS coronavirus
QLPQGTTLPK

SEQ ID NO: 9601 - protein, 10 aa, SARS coronavirus
LLNKHIDAYK

SEQ ID NO: 9602 - protein, 10 aa, SARS coronavirus
KTFPPTEPKK

SEQ ID NO: 9603 - protein, 10 aa, SARS coronavirus
ELSPRWYFYY

SEQ ID NO: 9604 - protein, 10 aa, SARS coronavirus
DLIRQGTDYK

SEQ ID NO: 9605 - protein, 10 aa, SARS coronavirus
ILLNKHIDAY

SEQ ID NO: 9606 - protein, 10 aa, SARS coronavirus
GLPNNTASWF

SEQ ID NO: 9607 - protein, 10 aa, SARS coronavirus
NQLESKVSGK

SEQ ID NO: 9608 - protein, 10 aa, SARS coronavirus
LLPAADMDDF

SEQ ID NO: 9609 - protein, 10 aa, SARS coronavirus
QQQGQTVTKK

SEQ ID NO: 9610 - protein, 10 aa, SARS coronavirus
KMKELSPRWY

SEQ ID NO: 9611 - protein, 10 aa, SARS coronavirus
GTGPEASLPY

SEQ ID NO: 9612 - protein, 10 aa, SARS coronavirus
RVRGGDGKMK

SEQ ID NO: 9613 - protein, 10 aa, SARS coronavirus
ATEGALNTPK

SEQ ID NO: 9614 - protein, 10 aa, SARS coronavirus
LLLLDRLNQL

SEQ ID NO: 9615 - protein, 10 aa, SARS coronavirus
WLTYHGAIKL

SEQ ID NO: 9616 - protein, 10 aa, SARS coronavirus
YLGTGPEASL

SEQ ID NO: 9617 - protein, 10 aa, SARS coronavirus
ALALLLLDRL

SEQ ID NO: 9618 - protein, 10 aa, SARS coronavirus
ALTQHGKEEL

SEQ ID NO: 9619 - protein, 9 aa, SARS coronavirus
QFKDNVILL

SEQ ID NO: 9620 - protein, 9 aa, SARS coronavirus
QFAPSASAF

SEQ ID NO: 9621 - protein, 9 aa, SARS coronavirus
LLLDRLNQL

SEQ ID NO: 9622 - protein, 9 aa, SARS coronavirus
YYLGTGPEA

SEQ ID NO: 9623 - protein, 9 aa, SARS coronavirus
LQLPQGTTL

SEQ ID NO: 9624 - protein, 9 aa, SARS coronavirus
LALLLLDRL

SEQ ID NO: 9625 - protein, 9 aa, SARS coronavirus
QGNFGDQDL

SEQ ID NO: 9626 - protein, 9 aa, SARS coronavirus
KQYNVTQAF

SEQ ID NO: 9627 - protein, 9 aa, SARS coronavirus
LTQHGKEEL

SEQ ID NO: 9628 - protein, 9 aa, SARS coronavirus
VWVATEGAL

SEQ ID NO: 9629 - protein, 9 aa, SARS coronavirus
GGETALALL

SEQ ID NO: 9630 - protein, 9 aa, SARS coronavirus
DYKHWPQIA

SEQ ID NO: 9631 - protein, 9 aa, SARS coronavirus
YYRRATRRV

SEQ ID NO: 9632 - protein, 9 aa, SARS coronavirus
PYGANKEGI

SEQ ID NO: 9633 - protein, 9 aa, SARS coronavirus
NTASWFTAL

SEQ ID NO: 9634 - protein, 9 aa, SARS coronavirus
SPRWYFYYL

SEQ ID NO: 9635 - protein, 9 aa, SARS coronavirus
GGGETALAL

SEQ ID NO: 9636 - protein, 9 aa, SARS coronavirus
EVTPSGTWL

SEQ ID NO: 9637 - protein, 9 aa, SARS coronavirus
KLDDKDPQF

SEQ ID NO: 9638 - protein, 9 aa, SARS coronavirus
DMDDFSRQL

SEQ ID NO: 9639 - protein, 10 aa, SARS coronavirus
RFPRGQGVPI

SEQ ID NO: 9640 - protein, 10 aa, SARS coronavirus
QFAPSASAFF

SEQ ID NO: 9641 - protein, 10 aa, SARS coronavirus
RGGDGKMKEL

SEQ ID NO: 9642 - protein, 10 aa, SARS coronavirus
RPKQRRPQGL

SEQ ID NO: 9643 - protein, 10 aa, SARS coronavirus
RQKKQPTVTL

SEQ ID NO: 9644 - protein, 10 aa, SARS coronavirus
YYLGTGPEAS

SEQ ID NO: 9645 - protein, 10 aa, SARS coronavirus
LSPRWYFYYL

SEQ ID NO: 9646 - protein, 10 aa, SARS coronavirus
GGETALALLL

SEQ ID NO: 9647 - protein, 10 aa, SARS coronavirus
LLLLDRLNQL

SEQ ID NO: 9648 - protein, 10 aa, SARS coronavirus
RGPEQTQGNF

SEQ ID NO: 9649 - protein, 10 aa, SARS coronavirus
NPNNNAATVL

SEQ ID NO: 9650 - protein, 10 aa, SARS coronavirus
NNNAATVLQL

SEQ ID NO: 9651 - protein, 10 aa, SARS coronavirus
VLQLPQGTTL

SEQ ID NO: 9652 - protein, 10 aa, SARS coronavirus
FYAEGSRGGS

SEQ ID NO: 9653 - protein, 10 aa, SARS coronavirus
DPQFKDNVIL

SEQ ID NO: 9654 - protein, 10 aa, SARS coronavirus
FYYLGTGPEA

SEQ ID NO: 9655 - protein, 10 aa, SARS coronavirus
GYYRRATRRV

SEQ ID NO: 9656 - protein, 10 aa, SARS coronavirus
NNTASWFTAL

SEQ ID NO: 9657 - protein, 10 aa, SARS coronavirus
GGGETALALL

SEQ ID NO: 9658 - protein, 10 aa, SARS coronavirus
ALALLLLDRL

SEQ ID NO: 9659 - protein, 9 aa, SARS coronavirus
LLLDRLNQL

SEQ ID NO: 9660 - protein, 9 aa, SARS coronavirus
RLNQLESKV

SEQ ID NO: 9661 - protein, 9 aa, SARS coronavirus
GMSRIGMEV

SEQ ID NO: 9662 - protein, 9 aa, SARS coronavirus
ILLNKHIDA

SEQ ID NO: 9663 - protein, 9 aa, SARS coronavirus
LQLPQGTTL

SEQ ID NO: 9664 - protein, 9 aa, SARS coronavirus
QLQNSMSGA

SEQ ID NO: 9665 - protein, 9 aa, SARS coronavirus
TTLPKGFYA

SEQ ID NO: 9666 - protein, 9 aa, SARS coronavirus
GQQQQGQTV

SEQ ID NO: 9667 - protein, 9 aa, SARS coronavirus
ALNTPKDHI

SEQ ID NO: 9668 - protein, 9 aa, SARS coronavirus
IVWVATEGA

SEQ ID NO: 9669 - protein, 9 aa, SARS coronavirus
QIAQFAPSA

SEQ ID NO: 9670 - protein, 9 aa, SARS coronavirus
TVLQLPQGT

SEQ ID NO: 9671 - protein, 9 aa, SARS coronavirus
LALLLLDRL

SEQ ID NO: 9672 - protein, 9 aa, SARS coronavirus
AQFAPSASA

SEQ ID NO: 9673 - protein, 9 aa, SARS coronavirus
VLQLPQGTT

SEQ ID NO: 9674 - protein, 9 aa, SARS coronavirus
LTYHGAIKL

SEQ ID NO: 9675 - protein, 9 aa, SARS coronavirus
DMDDFSRQL

SEQ ID NO: 9676 - protein, 9 aa, SARS coronavirus
VTPSGTWLT

SEQ ID NO: 9677 - protein, 9 aa, SARS coronavirus
SAFFGMSRI

SEQ ID NO: 9678 - protein, 9 aa, SARS coronavirus
RTATKQYNV

SEQ ID NO: 9679 - protein, 10 aa, SARS coronavirus
LLLLDRLNQL

SEQ ID NO: 9680 - protein, 10 aa, SARS coronavirus
YLGTGPEASL

SEQ ID NO: 9681 - protein, 10 aa, SARS coronavirus
WLTYHGAIKL

SEQ ID NO: 9682 - protein, 10 aa, SARS coronavirus
VLQLPQGTTL

SEQ ID NO: 9683 - protein, 10 aa, SARS coronavirus
ALALLLLDRL

SEQ ID NO: 9684 - protein, 10 aa, SARS coronavirus
GANKEGIVWV

SEQ ID NO: 9685 - protein, 10 aa, SARS coronavirus
ALTQHGKEEL

SEQ ID NO: 9686 - protein, 10 aa, SARS coronavirus
FGMSRIGMEV

SEQ ID NO: 9687 - protein, 10 aa, SARS coronavirus
VILLNKHIDA

SEQ ID NO: 9688 - protein, 10 aa, SARS coronavirus
RQLQNSMSGA

SEQ ID NO: 9689 - protein, 10 aa, SARS coronavirus
KQPTVTLLPA

SEQ ID NO: 9690 - protein, 10 aa, SARS coronavirus
MEVTPSGTWL

SEQ ID NO: 9691 - protein, 10 aa, SARS coronavirus
IVWVATEGAL

SEQ ID NO: 9692 - protein, 10 aa, SARS coronavirus
LPNNTASWFT

SEQ ID NO: 9693 - protein, 10 aa, SARS coronavirus
WVATEGALNT

SEQ ID NO: 9694 - protein, 10 aa, SARS coronavirus
SMSGASADST

SEQ ID NO: 9695 - protein, 10 aa, SARS coronavirus
GMSRIGMEVT

SEQ ID NO: 9696 - protein, 10 aa, SARS coronavirus
LSPRWYFYYL

SEQ ID NO: 9697 - protein, 10 aa, SARS coronavirus
GTTLPKGFYA

SEQ ID NO: 9698 - protein, 10 aa, SARS coronavirus
TQGNFGDQDL

SEQ ID NO: 9699 - protein, 9 aa, SARS coronavirus
KTFPPTEPK

SEQ ID NO: 9700 - protein, 9 aa, SARS coronavirus
FTALTQHGK

SEQ ID NO: 9701 - protein, 9 aa, SARS coronavirus
QQQGQTVTK

SEQ ID NO: 9702 - protein, 9 aa, SARS coronavirus
QQGQTVTKK

SEQ ID NO: 9703 - protein, 10 aa, SARS coronavirus
KTFPPTEPKK

SEQ ID NO: 9704 - protein, 10 aa, SARS coronavirus
RVRGGDGKMK

SEQ ID NO: 9705 - protein, 10 aa, SARS coronavirus
KLDDKDPQFK

SEQ ID NO: 9706 - protein, 10 aa, SARS coronavirus
ATEGALNTPK

SEQ ID NO: 9707 - protein, 10 aa, SARS coronavirus
NQLESKVSGK

SEQ ID NO: 9708 - protein, 10 aa, SARS coronavirus
QLPQGTTLPK

SEQ ID NO: 9709 - protein, 10 aa, SARS coronavirus
QQQQGQTVTK

SEQ ID NO: 9710 - protein, 10 aa, SARS coronavirus
QQQGQTVTKK

SEQ ID NO: 9711 - protein, 10 aa, SARS coronavirus
KPRQKRTATK

SEQ ID NO: 9712 - protein, 10 aa, SARS coronavirus
AQPLPQRQKK

SEQ ID NO: 9713 - protein, 9 aa, SARS coronavirus
SPRWYFYYL

SEQ ID NO: 9714 - protein, 9 aa, SARS coronavirus
FPRGQGVPI

SEQ ID NO: 9715 - protein, 9 aa, SARS coronavirus
RVRGGDGKM

SEQ ID NO: 9716 - protein, 9 aa, SARS coronavirus
KPRQKRTAT

SEQ ID NO: 9717 - protein, 9 aa, SARS coronavirus
EVTPSGTWL

SEQ ID NO: 9718 - protein, 9 aa, SARS coronavirus
ASGGGETAL

SEQ ID NO: 9719 - protein, 9 aa, SARS coronavirus
LALLLLDRL

SEQ ID NO: 9720 - protein, 9 aa, SARS coronavirus
FSRQLQNSM

SEQ ID NO: 9721 - protein, 9 aa, SARS coronavirus
DPQFKDNVI

SEQ ID NO: 9722 - protein, 9 aa, SARS coronavirus
APRITFGGP

SEQ ID NO: 9723 - protein, 9 aa, SARS coronavirus
LGTGPEASL

SEQ ID NO: 9724 - protein, 9 aa, SARS coronavirus
NTASWFTAL

SEQ ID NO: 9725 - protein, 9 aa, SARS coronavirus
LTQHGKEEL

SEQ ID NO: 9726 - protein, 9 aa, SARS coronavirus
NPNNNAATV

SEQ ID NO: 9727 - protein, 9 aa, SARS coronavirus
NNAATVLQL

SEQ ID NO: 9728 - protein, 9 aa, SARS coronavirus
LQLPQGTTL

SEQ ID NO: 9729 - protein, 9 aa, SARS coronavirus
GGGETALAL

SEQ ID NO: 9730 - protein, 9 aa, SARS coronavirus
ETALALLLL

SEQ ID NO: 9731 - protein, 9 aa, SARS coronavirus
LLLDRLNQL

SEQ ID NO: 9732 - protein, 9 aa, SARS coronavirus
QGNFGDQDL

SEQ ID NO: 9733 - protein, 10 aa, SARS coronavirus
RPKQRRPQGL

SEQ ID NO: 9734 - protein, 10 aa, SARS coronavirus
NPNNNAATVL

SEQ ID NO: 9735 - protein, 10 aa, SARS coronavirus
DPQFKDNVIL

SEQ ID NO: 9736 - protein, 10 aa, SARS coronavirus
APRITFGGPT

SEQ ID NO: 9737 - protein, 10 aa, SARS coronavirus
APSASAFFGM

SEQ ID NO: 9738 - protein, 10 aa, SARS coronavirus
IVWVATEGAL

SEQ ID NO: 9739 - protein, 10 aa, SARS coronavirus
ALTQHGKEEL

SEQ ID NO: 9740 - protein, 10 aa, SARS coronavirus
MASGGGETAL

SEQ ID NO: 9741 - protein, 10 aa, SARS coronavirus
ALALLLLDRL

SEQ ID NO: 9742 - protein, 10 aa, SARS coronavirus
SSRGNSPARM

SEQ ID NO: 9743 - protein, 10 aa, SARS coronavirus
LPYGANKEGI

SEQ ID NO: 9744 - protein, 10 aa, SARS coronavirus
TVTLLPAADM

SEQ ID NO: 9745 - protein, 10 aa, SARS coronavirus
YLGTGPEASL

SEQ ID NO: 9746 - protein, 10 aa, SARS coronavirus
RQKKQPTVTL

SEQ ID NO: 9747 - protein, 10 aa, SARS coronavirus
NNTASWFTAL

SEQ ID NO: 9748 - protein, 10 aa, SARS coronavirus
FPRGQGVPIN

SEQ ID NO: 9749 - protein, 10 aa, SARS coronavirus
RGGDGKMKEL

SEQ ID NO: 9750 - protein, 10 aa, SARS coronavirus
LSPRWYFYYL

SEQ ID NO: 9751 - protein, 10 aa, SARS coronavirus
NNNAATVLQL

SEQ ID NO: 9752 - protein, 10 aa, SARS coronavirus
VLQLPQGTTL

SEQ ID NO: 9753 - DNA, 29 bp, Artificial Sequence
  Primer
agtcggatccggtaggcttatcattagag

SEQ ID NO: 9754 - DNA, 20 bp, Artificial Sequence
  Primer
ccatcaggggagaaaggcac

SEQ ID NO: 9755 - DNA, 20 bp, Artificial Sequence
  Primer
gtgcctttctcccctgatgg

SEQ ID NO: 9756 - DNA, 19 bp, Artificial Sequence
  Primer
gaagagcagcgccagcacc

SEQ ID NO: 9757 - DNA, 19 bp, Artificial Sequence
  Primer
ggtgctggcgctgctcttc

SEQ ID NO: 9758 - DNA, 28 bp, Artificial Sequence
  Primer
actgtctagagttcgtttatgtgtaatg

SEQ ID NO: 9759 - DNA, 29 bp, Artificial Sequence
  Primer
agtcggatccgaccggtgcaccacttttg

SEQ ID NO: 9760 - DNA, 28 bp, Artificial Sequence
  Primer
agtcgggcccctgttcagcagcaatacc

SEQ ID NO: 9761 - DNA, 24 bp, Artificial Sequence
  Primer
ctagctcgagcaacagcatctgtg

SEQ ID NO: 9762 - DNA, 23 bp, Artificial Sequence
  Primer
gatcggatccggtacaatcacag

SEQ ID NO: 9763 - DNA, 23 bp, Artificial Sequence
  Primer
gatcgggcccgacacactggttc

SEQ ID NO: 9764 - protein, 4 aa, SARS coronavirus
NPTI

SEQ ID NO: 9765 - protein, 4 aa, SARS coronavirus
NPTD

SEQ ID NO: 9766 - protein, 179 aa, SARS coronavirus
MESLVLGVNEKTHVQLSLPVLQVRDVLVRGFGDSVEEALSEAREHLKNGTCGLVELEKGVLPQLEQPYVFIKRSDALSTNHGHKVVELVAEMDGIQYGRSGITLGVLVPHVGETPIAYRNVLLRKNGNKGAGGHSYGIDLKSYDLGDELGTDPIEDYEQNWNTKHGSGALRELTRELNG

SEQ ID NO: 9767 - protein, 639 aa, SARS coronavirus
GAVTRYVDNNFCGPDGYPLDCIKDFLARAGKSMCTLSEQLDYIESKRGVYCCRDHEHEIAWFTERSDKSYEHQTPFEIKSAKKFDTFKGECPKFVFPLNSKVKVIQPRVEKKKTEGFMGRIRSVYPVASPQECNNMHLSTLMKCNHCDEVSWQTCDFLKATCEHCGTENLVIEGPTTCGYLPTNAVVKMPCPACQDPEIGPEHSVADYHNHSNIETRLRKGGRTRCFGGCVFAYVGCYNKRAYWVPRASADIGSGHTGITGDNVETLNEDLLEILSRERVNINIVGDFHLNEEVAIILASFSASTSAFIDTIKSLDYKSFKTIVESCGNYKVTKGKPVKGAWNIGQQRSVLTPLCGFPSQAAGVIRSIFARTLDAANHSIPDLQRAAVTILDGISEQSLRLVDAMVYTSDLLTNSVIIMAYVTGGLVQQTSQWLSNLLGTTVEKLRPIFEWIEAKLSAGVEFLKDAWEILKFLITGVFDIVKGQIQVASDNIKDCVKCFIDVVNKALEMCIDQVTIAGAKLRSLNLGEVFIAQSKGLYRQCIRGKEQLQLLMPLKAPKEVTFLEGDSHDTVLTSEEVVLKNGELEALETPVDSFTNGAIVGTPVCVNGLMLLEIKDKEQYCALSPGLLATNNVFRLKGG

SEQ ID NO: 9768 - protein, 2422 aa, SARS coronavirus
APIKGVTFGEDTVWEVQGYKNVRITFELDERVDKVLNEKCSVYTVESGTEVTEFACVVAEAVVKTLQPVSDLLTNMGIDLDEWSVATFYLFDDAGEENFSSRMYCSFYPPDEEEEDDAECEEEEIDETCEHEYGTEDDYQGLPLEFGASAETVRVEEEEEEDWLDDTTEQSEIEPEPEPTPEEPVNQFTGYLKLTDNVAIKCVDIVKEAQSANPMVIVNAANIHLKHGGGVAGALNKATNGAMQKESDDYIKLNGPLTVGGSCLLSGHNLAKKCLHVVGPNLNAGEDIQLLKAAYENFNSQDILLAPLLSAGIFGAKPLQSLQVCVQTVRTQVYIAVNDKALYEQVVMDYLDNLKPRVEAPKQEEPPNTEDSKTEEKSVVQKPVDVKPKIKACIDEVTTTLEETKFLTNKLLLFADINGKLYHDSQNMLRGEDMSFLEKDAPYMVGDVITSGDITCVVIPSKKAGGTTEMLSRALKKVPVDEYITTYPGQGCAGYTLEEAKTALKKCKSAFYVLPSEAPNAKEEILGTVSWNLREMLAHAEETRKLMPICMDVRAIMATIQRKYKGIKIQEGIVDYGVRFFFYTSKEPVASIITKLNSLNEPLVTMPIGYVTHGFNLEEAARCMRSLKAPAVVSVSSPDAVTTYNGYLTSSSKTSEEHFVETVSLAGSYRDWSYSGQRTELGVEFLKRGDKIVYHTLESPVEFHLDGEVLSLDKLKSLLSLREVKTIKVFTTVDNTNLHTQLVDMSMTYGQQFGPTYLDGADVTKIKPHVNHEGKTFFVLPSDDTLRSEAFEYYHTLDESFLGRYMSALNHTKKWKFPQVGGLTSIKWADNNCYLSSVLLALQQLEVKFNAPALQEAYYRARAGDAANFCALILAYSNKTVGELGDVRETMTHLLQHANLESAKRVLNVVCKHCGQKTTTLTGVEAVMYMGTLSYDNLKTGVSIPCVCGRDATQYLVQQESSFVMMSAPPAEYKLQQGTFLCANEYTGNYQCGHYTHITAKETLYRIDGAHLTKMSEYKGPVTDVFYKETSYTTTIKPVSYKLDGVTYTEIEPKLDGYYKKDNAYYTEQPIDLVPTQPLPNASFDNFKLTCSNTKFADDLNQMTGFTKPASRELSVTFFPDLNGDVVAIDYRHYSASFKKGAKLLHKPIVWHINQATTKTTFKPNTWCLRCLWSTKPVDTSNSFEVLAVEDTQGMDNLACESQQPTSEEVVENPTIQKEVIECDVKTTEVVGNVILKPSDEGVKVTQELGHEDLMAAYVENTSITIKKPNELSLALGLKTIATHGIAAINSVPWSKILAYVKPFLGQAAITTSNCAKRLAQRVFNNYMPYVFTLLFQLCTFTKSTNSRIRASLPTTIAKNSVKSVAKLCLDAGINYVKSPKFSKLFTIAMWLLLLSICLGSLICVTAAFGVLLSNFGAPSYCNGVRELYLNSSNVTTMDFCEGSFPCSICLSGLDSLDSYPALETIQVTISSYKLDLTILGLAAEWVLAYMLFTKFFYLLGLSAIMQVFFGYFASHFISNSWLMWFIISIVQMAPVSAMVRMYIFFASFYYIWKSYVHIMDGCTSSTCMMCYKRNRATRVECTTIVNGMKRSFYVYANGGRGFCKTHNWNCLNCDTFCTGSTFISDEVARDLSLQFKRPINPTDQSSYIVDSVAVKNGALHLYFDKAGQKTYERHPLSHFVNLDNLRANNTKGSLPINVIVFDGKSKCDESASKSASVYYSQLMCQPILLLDQALVSDVGDSTEVSVKMFDAYVDTFSATFSVPMEKLKALVATAHSELAKGVALDGVLSTFVSAARQGVVDTDVDTKDVIECLKLSHHSDLEVTGDSCNNFMLTYNKVENMTPRDLGACIDCNARHINAQVAKSHNVSLIWNVKDYMSLSEQLRKQIRSAAKKNNIPFRLTCATTRQVVNVITTKISLKGGKIVSTCFKLMLKATLLCVLAALVCYIVMPVHTLSIHDGYTNEIIGYKAIQDGVTRDIISTDDCFANKHAGFDAWFSQRGGSYKNDKSCPVVAAIITREIGFIVPGLPGTVLRAINGDFLHFLPRVFSAVGNICYTPSKLIEYSDFATSACVLAAECTIFKDAMGKPVPYCYDTNLLEGSISYSELRPDTRYVLMDGSIIQFPNTYLEGSVRVVTTFDAEYCRHGTCERSEVGICLSTSGRWVLNNEHYRALSGVFCGVDAMNLIANIFTPLVQPVGALDVSASVVAGGIIAILVTCAAYYFMKFRRVFGEYNHVVAANALLFLMSFTILCLVPAYSFLPGVYSVFYLYLTFYFTNDVSFLAHLQWFAMFSPIVPFWITAIYVFCISLKHCHWFFNNYLRKRVMFNGVTFSTFEEAALCTFLLNKEMYLKLRSETLLPLTQYNRYLALYNKYKYFSGALDTTSYREAACCHLAKALNDFSNSGADVLYQPPQTSITSAVLQ

SEQ ID NO: 9769 - protein, 306 aa, SARS coronavirus; identical to SEQ ID NO: 6569

SEQ ID NO: 9770 - protein, 290 aa, SARS coronavirus
GKFKKIVKGTHHWMLLTFLTSLLILVQSTQWSLFFFVYENAFLPFTLGIMAIAACAMLLVKHKHAFLCLFLLPSLATVAYFNMVYMPASWVMRIMTWLELADTSLSGYRLKDCVMYASALVLLILMTARTVYDDAARRVWTLMNVITLVYKVYYGNALDQAISMWALVISVTSNYSGVVTTIMFLARAIVFVCVEYYPLLFITGNTLQCIMLVYCFLGYCCCCYFGLFCLLNRYFRLTLGVYDYLVSTQEFRYMNSQGLLPPKSSIDAFKLNIKLLGIGGKPCIKVATVQ

SEQ ID NO: 9771 - protein, 83 aa, SARS coronavirus
SKMSDVKCTSVVLLSVLQQLRVESSSKLWAQCVQLHNDILLAKDTTEAFEKMVSLLSVLLSMQGAVDINRLCEEMLDNRATLQ

SEQ ID NO: 9772 - protein, 198 aa, SARS coronavirus
AIASEFSSLPSYAAYATAQEAYEQAVANGDSEVVLKKLKKSLNVAKSEFDRDAAMQRKLEKMADQAMTQMYKQARSEDKRAKVTSAMQTMLFTMLRKLDNDALNNIINNARDGCVPLNIIPLTTAAKLMVVVPDYGTYKNTCDGNTFTYASALWEIQQVVDADSKIVQLSEINMDNSPNLAWPLIVTALRANSAVKLQ

SEQ ID NO: 9773 - protein, 113 aa, SARS coronavirus
NNELSPVALRQMSCAAGTTQTACTDDNALAYYNNSKGGRFVLALLSDHQDLKWARFPKSDGTGTIYTELEPPCRFVTDTPKGPKVKYLYFIKGLNNLNRGMVLGSLAATVRLQ

SEQ ID NO: 9774 - protein, 139 aa, SARS coronavirus
AGNATEVPANSTVLSFCAFAVDPAKAYKDYLASGGQPITNCVKMLCTHTGTGQAITVTPEANMDQESFGGASCCLYCRCHIDHPNPKGFCDLKGKYVQIPTTCANDPVGFTLRNTVCTVCGMWKGYGCSCDQLREPLMQ

SEQ ID NO: 9775 - protein, 932 aa, SARS coronavirus
SADASTFLNRVCGVSAARLTPCGTGTSTDVVYRAFDIYNEKVAGFAKFLKTNCCRFQEKDEEGNLLDSYFVVKRHTMSNYQHEETIYNLVKDCPAVAVHDFFKFRVDGDMVPHISRQRLTKYTMADLVYALRHFDEGNCDTLKEILVTYNCCDDDYFNKKDWYDFVENPDILRVYANLGERVRQSLLKTVQFCDAMRDAGIVGVLTLDNQDLNGNWYDFGDFVQVAPGCGVPIVDSYYSLLMPILTLTRALAAESHMDADLAKPLIKWDLLKYDFTEERLCLFDRYFKYWDQTYHPNCINCLDDRCILHCANFNVLFSTVFPPTSFGPLVRKIFVDGVPFVVSTGYHFRELGVVHNQDVNLHSSRLSFKELLVYAADPAMHAASGNLLLDKRTTCFSVAALTNNVAFQTVKPGNFNKDFYDFAVSKGFFKEGSSVELKHFFFAQDGNAAISDYDYYRYNLPTMCDIRQLLFVVEVVDKYFDCYDGGCINANQVIVNNLDKSAGFPFNKWGKARLYYDSMSYEDQDALFAYTKRNVIPTITQMNLKYAISAKNRARTVAGVSICSTMTNRQFHQKLLKSIAATRGATVVIGTSKFYGGWHNMLKTVYSDVETPHLMGWDYPKCDRAMPNMLRIMASLVLARKHNTCCNLSHRFYRLANECAQVLSEMVMCGGSLYVKPGGTSSGDATTAYANSVFNICQAVTANVNALLSTDGNKIADKYVRNLQHRLYECLYRNRDVDHEFVDEFYAYLRKHFSMMILSDDAVVCYNSNYAAQGLVASIKNFKAVLYYQNNVFMSEAKCWTETDLTKGPHEFCSQHTMLVKQGDDYVYLPYPDPSRILGAGCFVDDIVKTDGTLMIERFVSLAIDAYPLTKHPNQEYADVFHLYLQYIRKLHDELTGHMLDMYSVMLTNDNTSRYWEPEFYEAMYTPHTVLQ

SEQ ID NO: 9776 - protein, 601 aa, SARS coronavirus
AVGACVLCNSQTSLRCGACIRRPFLCCKCCYDHVISTSHKLVLSVNPYVCNAPGCDVTDVTQLYLGGMSYYCKSHKPPISFPLCANGQVFGLYKNTCVGSDNVTDFNAIATCDWTNAGDYILANTCTERLKLFAAETLKATEETFKLSYGIATVREVLSDRELHLSWEVGKPRPPLNRNYVFTGYRVTKNSKVQIGEYTFEKGDYGDAVVYRGTTTYKLNVGDYFVLTSHTVMPLSAPTLVPQEHYVRITGLYPTLNISDEFSSNVANYQKVGMQKYSTLQGPPGTGKSHFAIGLALYYPSARIVYTACSHAAVDALCEKALKYLPIDKCSRIIPARARVECFDKFKVNSTLEQYVFCTVNALPETTADIVVFDEISMATNYDLSVVNARLRAKHYVYIGDPAQLPAPRTLLTKGTLEPEYFNSVCRLMKTIGPDMFLGTCRRCPAEIVDTVSALVYDNKLKAHKDKSAQCFKMFYKGVITHDVSSAINRPQIGVVREFLTRNPAWRKAVFISPYNSQNAVASKILGLPTQTVDSSQGSEYDYVIFTQTTETAHSCNVNRFNVAITRAKIGILCIMSDRDLYDKLQFTSLEIPRRNVATLQ

SEQ ID NO: 9777 - protein, 527 aa, SARS coronavirus
AENVTGLFKDCSKIITGLHPTQAPTHLSVDIKFKTEGLCVDIPGIPKDMTYRRLISMMGFKMNYQVNGYPNMFITREEAIRHVRAWIGFDVEGCHATRDAVGTNLPLQLGFSTGVNLVAVPTGYVDTENNTEFTRVNAKPPPGDQFKHLIPLMYKGLPWNVVRIKIVQMLSDTLKGLSDRVVFVLWAHGFELTSMKYFVKIGPERTCCLCDKRATCFSTSSDTYACWNHSVGFDYVYNPFMIDVQQWGFTGNLQSNHDQHCQVHGNAHVASCDAIMTRCLAVHECFVKRVDWSVEYPIIGDELRVNSACRKVQHMVVKSALLADKFPVLHDIGNPKAIKCVPQAEVEWKFYDAQPCSDKAYKIEELFYSYATHHDKFTDGVCLFWNCNVDRYPANAIVCRFDTRVLSNLNLPGCDGGSLYVNKHAFHTPAFDKSAFTNLKQLPFFYYSDSPCESHGKQVVSDIDYVPLKSATCITRCNLGGAVCRHHANEYRQYLDAYNMMISAGFSLWIYKQFDTYNLWNTFTRLQ

SEQ ID NO: 9778 - protein, 346 aa, SARS coronavirus
SLENVAYNVVNKGHFDGHAGEAPVSIINNAVYTKVDGIDVEIFENKTTLPVNVAFELWAKRNIKPVPEIKILNNLGVDIAANTVIWDYKREAPAHVSTIGVCTMTDIAKKPTESACSSLTVLFDGRVEGQVDLFRNARNGVLITEGSVKGLTPSKGPAQASVNGVTLIGESVKTQFNYFKKVDGIIQQLPETYFTQSRDLEDFKPRSQMETDFLELAMDEFIQRYKLEGYAFEHIVYGDFSHGQLGGLHLMIGLAKRSQDSPLKLEDFIPMDSTVKNYFITDAQTGSSKCVCSVIDLLLDDFVEIIKSQDLSVISKVVKVTIDYAEISFMLWCKDGHVETFYPKLQ

SEQ ID NO: 9779 - protein, 298 aa, SARS coronavirus
ASRAWQPGVAMPNLYKMQRMLLEKCDLQNYGENAVIPKGIMMNVAKYTQLCQYLNTLTLAVPYNMRVIHFGAGSDKGVAPGTAVLRQWLPTGTLLVDSDLNDFVSDAYSTLIGDCATVHTANKWDLIISDMYDPRTKHVTKENDSKEGFFTYLCGFIKQKLALGGSIAVKITEHSWNADLYKLMGHFSWWTAFVTNVNASSSEAFLIGANYLGKPKEQIDGYTMHANYIFWRNTNPIQLSSYSLFDMSKFPLKLRGTAVMSLKENQINDMIYSLLEKGRLIIRENNRVVVSSDILVNN

SEQ ID NO: 9780 - DNA, 21 bp, Artificial Sequence
  Primer
ttaggtttttacctacccagg

SEQ ID NO: 9781 - DNA, 22 bp, Artificial Sequence
  Primer
ttcgtttagagaacagatctac

SEQ ID NO: 9782 - DNA, 21 bp, Artificial Sequence
  Probe
aagccaaccaacctcgatctc

SEQ ID NO: 9783 - protein, 7 aa, SARS coronavirus
KKDKKKK

SEQ ID NO: 9784 - protein, 20 aa, SARS coronavirus
KKDKKKKTDEAQPLPQRQKK

SEQ ID NO: 9785 - DNA, 42 bp, Artificial Sequence
  Primer
agatcttctagataaaagaagtgaccttgaccggtgcaccac

SEQ ID NO: 9786 - DNA, 50 bp, Artificial Sequence
  Primer
agatctcctaggcattcgccatattgcttcatgaagccagcatcagcgag

SEQ ID NO: 9787 - DNA, 49 bp, Artificial Sequence
  Primer
agatctcctaggtgatattaatgctagggacctcatttgtgcgcagaag

SEQ ID NO: 9788 - DNA, 45 bp, Artificial Sequence
  Primer
agatctgtcgactcattatgtgtaatgtaatttgacacccttgag

SEQ ID NO: 9789 - DNA, 44 bp, Artificial Sequence
  Oligonucleotide
tgagcatgttgatacttcttatgagtgcgacattcctattggag

SEQ ID NO: 9790 - DNA, 39 bp, Artificial Sequence
  Oligonucleotide
ctggcatttgtgctagttaccatacagtttctttattac

SEQ ID NO: 9791 - DNA, 58 bp, Artificial Sequence
  Oligonucleotide
gtagtactagccaaaaatctattgtggcttatactatgtctttaggtgctgatagttc

SEQ ID NO: 9792 - DNA, 52 bp, Artificial Sequence
  Oligonucleotide
aattgaactatcagcacctaaagacatagtataagccacaatagatttttgg

SEQ ID NO: 9793 - DNA, 37 bp, Artificial Sequence
  Oligonucleotide
ctagtactacgtaataaagaaactgtatggtaactag

SEQ ID NO: 9794 - DNA, 53 bp, Artificial Sequence
  Oligonucleotide
cacaaatgccagctccaataggaatgtcgcactcataagaagtatcaacatgc

SEQ ID NO: 9795 - DNA, 29 bp, Artificial Sequence
  Oligonucleotide
agcttacaaaacaaaatgagtgaccttga

SEQ ID NO: 9796 - DNA, 29 bp, Artificial Sequence
  Oligonucleotide
ccggtcaaggtcactcattttgttttgta

SEQ ID NO: 9797 - DNA, 68 bp, Artificial Sequence
  Oligonucleotide
aaatgaatcactcattgaccttcaagaattgggaaaatatgagcaatatattaaatggccttaatgag

SEQ ID NO: 9798 - DNA, 72 bp, Artificial Sequence
  Oligonucleotide
tcgactcattaaggccatttaatatattgctcatattttcccaattcttgaaggtcaatgagtgattcattt

SEQ ID NO: 9799 - protein, 650 aa, SARS coronavirus
MSDLDRCTTFDDVQAPNYTQHTSSMRGVYYPDEIFRSDTLYLTQDLFLPFYSNVTGFHTINHTFGNPVIPFKDGIYFAATEKSNVVRGWVFGSTMNNKSQSVIIINNSTNVVIRACNFELCDNPFFAVSKPMGTQTHTMIFDNAFNCTFEYISDAFSLDVSEKSGNFKHLREFVFKNKDGFLYVYKGYQPIDVVRDLPSGFNTLKPIFKLPLGINITNFRAILTAFSPAQDIWGTSAAAYFVGYLKPTTFMLKYDENGTITDAVDCSQNPLAELKCSVKSFEIDKGIYQTSNFRVVPSGDVVRFPNITNLCPFGEVFNATKFPSVYAWERKKISNCVADYSVLYNSTFFSTFKCYGVSATKLNDLCFSNVYADSFVVKGDDVRQIAPGQTGVIADYNYKLPDDFMGCVLAWNTRNIDATSTGNYNYKYRYLRHGKLRPFERDISNVPFSPDGKPCTPPALNCYWPLNDYGFYTTTGIGYQPYRVVVLSFELLNAPATVCGPKLSTDLIKNQCVNFNFNGLTGTGVLTPSSKRFQPFQQFGRDVSDFTDSVRDPKTSEILDISPCSFGGVSVITPGTNASSEVAVLYQDVNCTDVSTAIHADQLTPAWRIYSTGNNVFQTQAGCLIGAEHVDTSYECDIPIGAGICASYHT

SEQ ID NO: 9800 - DNA, 1978 bp, Artificial Sequence
  Spike sequence for expression in yeast
aagcttacaaaacaaaatgagtgaccttgaccggtgcaccacttttgatgatgttcaagctcctaattacactcaacatacttcatctatgaggggggtttactatcctgatgaaatttttagatcagacactctttatttaactcaggatttatttcttccattttattctaatgttacagggtttcatactattaatcatacgtttggcaaccctgtcataccttttaaggatggtatttattttgctgccacagagaaatcaaatgttgtccgtggttgggtttttggttctaccatgaacaacaagtcacagtcggtgattattattaacaattctactaatgttgttatacgagcatgtaactttgaattgtgtgacaaccctttctttgctgtttctaaacccatgggtacacagacacatactatgatattcgataatgcatttaattgcactttcgagtacatatctgatgccttttcgcttgatgtttcagaaaagtcaggtaattttaaacacttacgagagtttgtgtttaaaaataaagatgggtttctctatgtttataagggctatcaacctatagatgtagttcgtgatctaccttctggttttaacactttgaaacctatttttaagttgcctcttggtattaacattacaaattttagagccattcttacagccttttcacctgctcaagacatttggggcacgtcagctgcagcctattttgttggctatttaaagccaactacatttatgctcaagtatgatgaaaatggtacaatcacagatgctgttgattgttctcaaaatccacttgctgaactcaaatgctctgttaagagctttgagattgacaaaggaatttaccagacctctaatttcagggttgttccctcaggagatgttgtgagattccctaatattacaaacttgtgtccttttggagaggtttttaatgctactaaattcccttctgtctatgcatgggagagaaaaaaaatttctaattgtgttgctgattactctgtgctctacaactcaacatttttttcaacctttaagtgctatggcgtttctgccactaagttgaatgatctttgcttctccaatgtctatgcagattcttttgtagtcaagggagatgatgtaagacaaatagcgccagggcaaactggtgttattgctgattataattataaattgccagatgatttcatgggttgtgtccttgcttggaatactaggaacattgatgctacttcaactggtaattataattataaatataggtatcttagacatggcaagcttaggccctttgagagagacatatctaatgtgcctttctcccctgatggcaaaccttgcaccccacctgctcttaattgttattggccattaaatgattatggtttttacaccactactggcattggctaccaaccttacagagttgtagtactttcttttgaacttttaaatgcaccggccacggtttgtggaccaaaattatccactgaccttattaagaaccagtgtgtcaattttaattttaatggactcactggtactggtgtgttaactccttcttcaaagagatttcaaccatttcaacaatttggccgtgatgtttctgatttcactgattccgttcgagatcctaaaacatctgaaatattagacatttcaccttgctcttttgggggtgtaagtgtaattacacctggaacaaatgcttcatctgaagttgctgttctatatcaagatgttaactgcactgatgtttctacagcaattcatgcagatcaactcacaccagcttggcgcatatattctactggaaacaatgtattccagactcaagcaggctgtcttataggagctgagcatgttgatacttcttatgagtgcgacattcctattggagctggcatttgtgctagttaccatacataatgagtcgac

SEQ ID NO: 9801 - protein, 1183 aa, SARS coronavirus
MSDLDRCTTFDDVQAPNYTQHTSSMRGVYYPDEIFRSDTLYLTQDLFLPFYSNVTGFHTINHTFGNPVIPFKDGIYFAATEKSNVVRGWVFGSTMNNKSQSVIIINNSTNVVIRACNFELCDNPFFAVSKPMGTQTHTMIFDNAFNCTFEYISDAFSLDVSEKSGNFKHLREFVFKNKDGFLYVYKGYQPIDVVRDLPSGFNTLKPIFKLPLGINITNFRAILTAFSPAQDIWGTSAAAYFVGYLKPTTFMLKYDENGTITDAVDCSQNPLAELKCSVKSFEIDKGIYQTSNFRVVPSGDVVRFPNITNLCPFGEVFNATKFPSVYAWERKKISNCVADYSVLYNSTFFSTFKCYGVSATKLNDLCFSNVYADSFVVKGDDVRQIAPGQTGVIADYNYKLPDDFMGCVLAWNTRNIDATSTGNYNYKYRYLRHGKLRPFERDISNVPFSPDGKPCTPPALNCYWPLNDYGFYTTTGIGYQPYRVVVLSFELLNAPATVCGPKLSTDLIKNQCVNFNFNGLTGTGVLTPSSKRFQPFQQFGRDVSDFTDSVRDPKTSEILDISPCSFGGVSVITPGTNASSEVAVLYQDVNCTDVSTAIHADQLTPAWRIYSTGNNVFQTQAGCLIGAEHVDTSYECDIPIGAGICASYHTVSLLRSTSQKSIVAYTMSLGADSSIAYSNNTIAIPTNFSISITTEVMPVSMAKTSVDCNMYICGDSTECANLLLQYGSFCTQLNRALSGIAAEQDRNTREVFAQVKQMYKTPTLKYFGGFNFSQILPDPLKPTKRSFIEDLLFNKVTLADAGFMKQYGECLGDINARDLICAQKFNGLTVLPPLLTDDMIAAYTAALVSGTATAGWTFGAGAALQIPFAMQMAYRFNGIGVTQNVLYENQKQIANQFNKAISQIQESLTTTSTALGKLQDVVNQNAQALNTLVKQLSSNFGAISSVLNDILSRLDKVEAEVQIDRLITGRLQSLQTYVTQQLIRAAEIRASANLAATKMSECVLGQSKRVDFCGKGYHLMSFPQAAPHGVVFLHVTYVPSQERNFTTAPAICHEGKAYFPREGVFVFNGTSWFITQRNFFSPQIITTDNTFVSGNCDVVIGIINNTVYDPLQPELDSFKEELDKYFKNHTSPDVDFGDISGINASVVNIQKEIDRLNEVAKNLNESLIDLQELGKYEQYIKWP

SEQ ID NO: 9802 - DNA, 3577 bp, Artificial Sequence
  Spike sequence for expression in yeast
aagcttacaaaacaaaatgagtgaccttgaccggtgcaccacttttgatgatgttcaagctcctaattacactcaacatacttcatctatgaggggggtttactatcctgatgaaatttttagatcagacactctttatttaactcaggatttatttcttccattttattctaatgttacagggtttcatactattaatcatacgtttggcaaccctgtcataccttttaaggatggtatttattttgctgccacagagaaatcaaatgttgtccgtggttgggtttttggttctaccatgaacaacaagtcacagtcggtgattattattaacaattctactaatgttgttatacgagcatgtaactttgaattgtgtgacaaccctttctttgctgtttctaaacccatgggtacacagacacatactatgatattcgataatgcatttaattgcactttcgagtacatatctgatgccttttcgcttgatgtttcagaaaagtcaggtaattttaaacacttacgagagtttgtgtttaaaaataaagatgggtttctctatgtttataagggctatcaacctatagatgtagttcgtgatctaccttctggttttaacactttgaaacctatttttaagttgcctcttggtattaacattacaaattttagagccattcttacagccttttcacctgctcaagacatttggggcacgtcagctgcagcctattttgttggctatttaaagccaactacatttatgctcaagtatgatgaaaatggtacaatcacagatgctgttgattgttctcaaaatccacttgctgaactcaaatgctctgttaagagctttgagattgacaaaggaatttaccagacctctaatttcagggttgttccctcaggagatgttgtgagattccctaatattacaaacttgtgtccttttggagaggtttttaatgctactaaattcccttctgtctatgcatgggagagaaaaaaaatttctaattgtgttgctgattactctgtgctctacaactcaacatttttttcaacctttaagtgctatggcgtttctgccactaagttgaatgatctttgcttctccaatgtctatgcagattcttttgtagtcaagggagatgatgtaagacaaatagcgccagggcaaactggtgttattgctgattataattataaattgccagatgatttcatgggttgtgtccttgcttggaatactaggaacattgatgctacttcaactggtaattataattataaatataggtatcttagacatggcaagcttaggccctttgagagagacatatctaatgtgcctttctcccctgatggcaaaccttgcaccccacctgctcttaattgttattggccattaaatgattatggtttttacaccactactggcattggctaccaaccttacagagttgtagtactttcttttgaacttttaaatgcaccggccacggtttgtggaccaaaattatccactgaccttattaagaaccagtgtgtcaattttaattttaatggactcactggtactggtgtgttaactccttcttcaaagagatttcaaccatttcaacaatttggccgtgatgtttctgatttcactgattccgttcgagatcctaaaacatctgaaatattagacatttcaccttgctcttttgggggtgtaagtgtaattacacctggaacaaatgcttcatctgaagttgctgttctatatcaagatgttaactgcactgatgtttctacagcaattcatgcagatcaactcacaccagcttggcgcatatattctactggaaacaatgtattccagactcaagcaggctgtcttataggagctgagcatgtcgacacttcttatgagtgcgacattcctattggagctggcatttgtgctagttaccatacagtttctttattacgtagtactagccaaaaatctattgtggcttatactatgtctttaggtgctgatagttcaattgcttactctaataacaccattgctatacctactaacttttcaattagcattactacagaagtaatgcctgtttctatggctaaaacctccgtagattgtaatatgtacatctgcggagattctactgaatgtgctaatttgcttctccaatatggtagcttttgcacacaactaaatcgtgcactctcaggtattgctgctgaacaggatcgcaacacacgtgaagtgttcgctcaagtcaaacaaatgtacaaaaccccaactttgaaatattttggtggttttaatttttcacaaatattacctgaccctctaaagccaactaagaggtcttttattgaggacttgctctttaataaggtgacactcgctgatgctggcttcatgaagcaatatggcgaatgcctaggtgatattaatgctagggacctcatttgtgcgcagaagttcaatggacttacagtgttgccacctctgctcactgatgatatgattgctgcctacactgctgctctagttagtggtactgccactgctggatggacatttggtgctggcgctgctcttcaaataccttttgctatgcaaatggcatataggttcaatggcattggagttacccaaaatgttctctatgagaaccaaaaacaaatcgccaaccaatttaacaaggcgattagtcaaattcaagaatcacttacaacaacatcaactgcattgggcaagctgcaagacgttgttaaccagaatgctcaagcattaaacacacttgttaaacaacttagctctaattttggtgcaatttcaagtgtgctaaatgatatcctttcgcgacttgataaagtcgaggcggaggtacaaattgacaggttaattacaggcagacttcaaagccttcaaacctatgtaacacaacaactaatcagggctgctgaaatcagggcttctgctaatcttgctgctactaaaatgtctgagtgtgttcttggacaatcaaaaagagttgacttttgtggaaagggctaccaccttatgtccttcccacaagcagccccgcatggtgttgtcttcctacatgtcacgtatgtgccatcccaggagaggaacttcaccacagcgccagcaatttgtcatgaaggcaaagcatacttccctcgtgaaggtgtttttgtgtttaatggcacttcttggtttattacacagaggaacttcttttctccacaaataattactacagacaatacatttgtctcaggaaattgtgatgtcgttattggcatcattaacaacacagtttatgatcctctgcaacctgagcttgactcattcaaagaagagctggacaagtacttcaaaaatcatacatcaccagatgttgattttggcgacatttcaggcattaacgcttctgtcgtcaacattcaaaaagaaattgaccgcctcaatgaggtcgctaaaaatttaaatgaatcactcattgaccttcaagaattgggaaaatatgagcaatatattaaatggccttaatgagtcgac

SEQ ID NO: 9803 - DNA, 27 bp, Artificial Sequence
  Primer
cccgctcgagtccattgagctcacgag

SEQ ID NO: 9804 - DNA, 30 bp, Artificial Sequence
  Primer
ctagctagcatgggtgcagtcactcgctat

SEQ ID NO: 9805 - DNA, 32 bp, Artificial Sequence
  Primer
ctagctagcatggcaccaattaaaggtgtaac

SEQ ID NO: 9806 - DNA, 37 bp, Artificial Sequence
  Primer
gcggatcccatatgtatttgtctagtgttttattagc

SEQ ID NO: 9807 - DNA, 33 bp, Artificial Sequence
  Primer
gcggatcccatatgatatggaagagctatgttc

SEQ ID NO: 9808 - DNA, 24 bp, Artificial Sequence
  Primer
agtggttttaggaaaatggcattc

SEQ ID NO: 9809 - DNA, 38 bp, Artificial Sequence
  Primer
gcggatccgctagcatgtctaaaatgtctgacgtaaag

SEQ ID NO: 9810 - DNA, 29 bp, Artificial Sequence
  Primer
ctagctagcatgtctgcggatgcatcaac

SEQ ID NO: 9811 - DNA, 32 bp, Artificial Sequence
  Primer
gcggatcccatatgtgtgatatcagacaactc

SEQ ID NO: 9812 - DNA, 28 bp, Artificial Sequence
  Primer
ctagtcagcatggctgtaggtgcttgtg

SEQ ID NO: 9813 - DNA, 33 bp, Artificial Sequence
  Primer
gcggatcccatatggcagaaaatgtaactggac

SEQ ID NO: 9814 - DNA, 28 bp, Artificial Sequence
  Primer
agtttagaaaatgtggcttataatgttg

SEQ ID NO: 9815 - DNA, 30 bp, Artificial Sequence
  Primer
atggatttgtttatgagattttttactctt

SEQ ID NO: 9816 - DNA, 26 bp, Artificial Sequence
  Primer
atgtactcattcgtttcggaagaaac

SEQ ID NO: 9817 - DNA, 25 bp, Artificial Sequence
  Primer
atgtgcttgaagatccttgtaaggt

SEQ ID NO: 9818 - DNA, 29 bp, Artificial Sequence
  Primer
gcggatcccatatggagagccttgttctt

SEQ ID NO: 9819 - DNA, 30 bp, Artificial Sequence
  Primer
cccaagcttacccccttttaagcgaaagac

SEQ ID NO: 9820 - DNA, 33 bp, Artificial Sequence
  Primer
cccgctcgagattgttatcagcccatttaattg

SEQ ID NO: 9821 - DNA, 32 bp, Artificial Sequence
  Primer
cccgctcgaggtagtagaaagaagcaaagaag

SEQ ID NO: 9822 - DNA, 27 bp, Artificial Sequence
  Primer
cccgctcgagctgcagaacagcagaag

SEQ ID NO: 9823 - DNA, 23 bp, Artificial Sequence
  Primer
ctgtacagtagcaaccttgatac

SEQ ID NO: 9824 - DNA, 26 bp, Artificial Sequence
  Primer
cccgctcgagctgcatcaagggttcg

SEQ ID NO: 9825 - DNA, 33 bp, Artificial Sequence
  Primer
cccgctcgagtgttggcagattataacgataat

SEQ ID NO: 9826 - DNA, 28 bp, Artificial Sequence
  Primer
cccgctcgagctgcaagactgtatgtgg

SEQ ID NO: 9827 - DNA, 30 bp, Artificial Sequence
  Primer
cccgctcgagttgtaatgtagccacattgc

SEQ ID NO: 9828 - DNA, 32 bp, Artificial Sequence
  Primer
cccgctcgagctgtaacctggtaaatgtattc

SEQ ID NO: 9829 - DNA, 30 bp, Artificial Sequence
  Primer
ttagttgttaacaagaatatcacttgaaac

SEQ ID NO: 9830 - DNA, 25 bp, Artificial Sequence
  Primer
ttaacgtacctgtttcttccgaaac

SEQ ID NO: 9831 - DNA, 25 bp, Artificial Sequence
  Primer
ctagtgttgtaccttacaaggatct

SEQ ID NO: 9832 - DNA, 21 bp, Artificial Sequence
  Primer
tcattttgccgtcaccaccac

SEQ ID NO: 9833 - DNA, 34 bp, Artificial Sequence
  Primer
gcggatcccatatgagtggttttaggaaaatggc

SEQ ID NO: 9834 - DNA, 29 bp, Artificial Sequence
  Primer
gcggatcccatatggagcttccaacagga

SEQ ID NO: 9835 - DNA, 38 bp, Artificial Sequence
  Primer
gcggatcccatatgggtaagttcaagaaaattgttaag

SEQ ID NO: 9836 - DNA, 37 bp, Artificial Sequence
  Primer
gcggatcccatatgtctaaaatgtctgacgtaaagtg

SEQ ID NO: 9837 - DNA, 39 bp, Artificial Sequence
  Primer
gcggatccgctagcatggctattgcttcagaatttagtt

SEQ ID NO: 9838 - DNA, 36 bp, Artificial Sequence
  Primer
gcggatcccatatgaataatgaactgagtccagtag

SEQ ID NO: 9839 - DNA, 33 bp, Artificial Sequence
  Primer
gcggatcccatatggctggaaatgctacagaag

SEQ ID NO: 9840 - DNA, 33 bp, Artificial Sequence
  Primer
ctagctagcatgagtttagaaaatgtggcttat

SEQ ID NO: 9841 - DNA, 30 bp, Artificial Sequence
  Primer
gcggatcccatatggcaagtcaagcgtggc

SEQ ID NO: 9842 - DNA, 29 bp, Artificial Sequence
  Primer
gcggatcccatatgagtgaccttgaccgg

SEQ ID NO: 9843 - DNA, 36 bp, Artificial Sequence
  Primer
gcggatcccatatggtttctttattacgtagtacta

SEQ ID NO: 9844 - DNA, 29 bp, Artificial Sequence
  Primer
gcggatcccatatgagtgaccttgaccgg

SEQ ID NO: 9845 - DNA, 32 bp, Artificial Sequence
  Primer
gggaattccatatggcatataggttcaatggc

SEQ ID NO: 9846 - DNA, 33 bp, Artificial Sequence
  Primer
gggaattccatatgccagatgttgattttggcg

SEQ ID NO: 9847 - DNA, 32 bp, Artificial Sequence
  Primer
gcggatcccatatggaggcgcaatttttgtac

SEQ ID NO: 9848 - DNA, 33 bp, Artificial Sequence
  Primer
gcggatcccatatgatgccaactactttgtttg

SEQ ID NO: 9849 - DNA, 33 bp, Artificial Sequence
  Primer
gcggatcccatatgtactcattcgtttcggaag

SEQ ID NO: 9850 - DNA, 30 bp, Artificial Sequence
  Primer
gcggatcccatatgctgtttgctcgtaccc

SEQ ID NO: 9851 - DNA, 30 bp, Artificial Sequence
  Primer
gcggatcccatatgaggactttcaggattg

SEQ ID NO: 9852 - DNA, 36 bp, Artificial Sequence
  Primer
gcggatcccatatgaaaattattctcttcctgacat

SEQ ID NO: 9853 - DNA, 34 bp, Artificial Sequence
  Primer
gcggatcccatatgaatggagctcactttaattg

SEQ ID NO: 9854 - DNA, 37 bp, Artificial Sequence
  Primer
gcggatccgctagcatgaaacttctcattgttttgac

SEQ ID NO: 9855 - DNA, 31 bp, Artificial Sequence
  Primer
gcggatcccatatgtgcttgaagatccttgt

SEQ ID NO: 9856 - DNA, 30 bp, Artificial Sequence
  Primer
gcggatcccatatgtctgataatggacccc

SEQ ID NO: 9857 - DNA, 29 bp, Artificial Sequence
  Primer
gcggatcccatatggaccccaatcaaacc

SEQ ID NO: 9858 - DNA, 31 bp, Artificial Sequence
  Primer
cccgctcgagtgatccattaaggaaagaacc

SEQ ID NO: 9859 - DNA, 27 bp, Artificial Sequence
  Primer
cccgctcgagttggaaggtaacaccag

SEQ ID NO: 9860 - DNA, 29 bp, Artificial Sequence
  Primer
cccgctcgagctgtacagtagcaaccttg

SEQ ID NO: 9861 - DNA, 27 bp, Artificial Sequence
  Primer
cccgctcgagctgaagagtagcacggt

SEQ ID NO: 9862 - DNA, 29 bp, Artificial Sequence
  Primer
cccgctcgagctgtagtttaacagctgag

SEQ ID NO: 9863 - DNA, 29 bp, Artificial Sequence
  Primer
cccgctcgagctgaagacgtactgtagca

SEQ ID NO: 9864 - DNA, 26 bp, Artificial Sequence
  Primer
cccgctcgagctgcatcaagggttcg

SEQ ID NO: 9865 - DNA, 29 bp, Artificial Sequence
  Primer
cccgctcgagttgtagttttgggtagaag

SEQ ID NO: 9866 - DNA, 35 bp, Artificial Sequence
  Primer
cccgctcgaggttgttaacaagaatatcacttgaa

SEQ ID NO: 9867 - DNA, 30 bp, Artificial Sequence
  Primer
cccgctcgagtgtatggtaactagcacaaa

SEQ ID NO: 9868 - DNA, 31 bp, Artificial Sequence
  Primer
cccgctcgagaggccatttaatatattgctc

SEQ ID NO: 9869 - DNA, 31 bp, Artificial Sequence; identical to SEQ ID NO: 9868
  Primer

SEQ ID NO: 9870 - DNA, 31 bp, Artificial Sequence
  Primer
cccgctcgagtgtaattaacctgtcaatttg

SEQ ID NO: 9871 - DNA, 34 bp, Artificial Sequence
  Primer
cccgctcgagaatatattgctcatattttcccaa

SEQ ID NO: 9872 - DNA, 27 bp, Artificial Sequence
  Primer
cccgctcgagcaaaggcacgctagtag

SEQ ID NO: 9873 - DNA, 28 bp, Artificial Sequence
  Primer
cccgctcgagacgtacctgtttcttccg

SEQ ID NO: 9874 - DNA, 28 bp, Artificial Sequence
  Primer
cccgctcgaggaccagaagatcaggaac

SEQ ID NO: 9875 - DNA, 32 bp, Artificial Sequence
  Primer
cccgctcgagctgtactagcaaagcaatattg

SEQ ID NO: 9876 - DNA, 31 bp, Artificial Sequence
  Primer
cccgctcgagtggataatctaactccatagg

SEQ ID NO: 9877 - DNA, 32 bp, Artificial Sequence
  Primer
cccgctcgagttctgtctttctcttaatggtg

SEQ ID NO: 9878 - DNA, 30 bp, Artificial Sequence
  Primer
cccgctcgaggactttggtacaaggttctt

SEQ ID NO: 9879 - DNA, 30 bp, Artificial Sequence
  Primer
cccgctcgaggtgttgtaccttacaaggat

SEQ ID NO: 9880 - DNA, 37 bp, Artificial Sequence
  Primer
cccgctcgagatttgttcgtttatttaaaacaacaag

SEQ ID NO: 9881 - DNA, 28 bp, Artificial Sequence
  Primer
ccggaattctgcctgagttgaatcagca

SEQ ID NO: 9882 - DNA, 26 bp, Artificial Sequence
  Primer
ccggaattcttttgccgtcaccacca

SEQ ID NO: 9883 - DNA, 1347 bp, Bovine coronavirus
atgtcttttactcctggtaagcaatccagtagtagagcgtcctctggaaatcgttctggtaatggcatccttaagtgggccgatcagtccgaccaatctagaaatgttcaaaccaggggtagaagagctcaacccaagcaaactgctacttctcagcaaccatcaggagggaatgttgtaccctactattcttggttctctggaattactcagtttcaaaagggaaaggagtttgaatttgcagagggacaaggtgtgcctattgcaccaggagtcccagctactgaagctaaggggtactggtacagacacaacagacgttcctttaaaacagccgatggcaaccagcgtcaattgctgccacgatggtatttttactatcttggaacaggaccgcatgccaaagaccagtatggcaccgacattgacggagtcttctgggtcgctagtaaccaggctgatgtcaataccccggctgacattctcgatcgggacccaagtagcgatgaggctattccgactaggtttccgcctggcacggtactccctcagggttactatattgaaggctcaggaaggtctgctcctaattccagatctacttcacgcgcatccagtagagcctctagtgcaggatcgcgcagtagagccaattctggcaatagaacccctacctctggtgtaacacctgatatggctgatcaaattgctagtcttgttctggcaaaacttggcaaggatgccactaagccacagcaagtaactaagcagactgccaaagaaatcagacagaaaattttgaataagccccgccagaagaggagccccaataaacaatgcactgttcagcagtgttttgggaagagaggccccaatcagaattttggtggtggagaaatgttaaaacttggaactagtgatccacagttccccattcttgcagaactcgcacccacagctggtgcgtttttctttggatcaagattagagttggccaaagtgcagaatttgtctgggaatcttgacgagccccagaaggatgtttatgaattgcgctataatggtgcaattagatttgacagtacactttcaggttttgagaccataatgaaggtgttgaatgagaatttgaatgcataccaacaacaagatggtatgatgaatatgagtccaaaaccacagcgtcagcgtggtcagaagaacggacaaggagaaaatgataatataagtgttgcagcgccaaaaagccgtgtgcagcaaaataagagtagagagttgactgcagaggacatcagccttcttaagaagatggatgagccctatactgaagacacctcagaaatataa

SEQ ID NO: 9884 - DNA, 693 bp, Bovine coronavirus
atgagtagtgtaactacaccagcaccagtttacacctggactgctgatgaagctattaaattcctaaaggaatggaacttttctttgggtattatactactttttattacagtcatattgcaatttggatatacaagtcgcagtatgtttgtttatgttattaagatgatcattttgtggcttatgtggccccttactatcatcttaactattttcaattgcgtgtatgcgttgaataatgtgtatcttggcttctctatagtttttactatagtggccattatcatgtggattgtgtattttgtgaatagtatcaggttgtttattagaactggaagttggtggagtttcaacccagaaacaaacaacttgatgtgtatagatatgaagggaaggatgtatgttaggccgataattgaggactaccatacccttacggtcacaataatacgtggtcatctttacatgcaaggtataaaactaggtactggttattctttgtcagacttgccagcttatgtgactgttgctaaggtctcacacctgctcacgtataagcgtggttttcttgacaagataggcgatactagtggttttgctgtttatgttaagtccaaagtcggtaattaccgactgccatcaacccaaaagggttctggcatggacaccgcattgttgagaaataatatctaa

SEQ ID NO: 9885 - DNA, 1290 bp, Bovine coronavirus
ctaaactcagtgaaaatgtttttgcttcctagatttgttctagttagctgcataattggtagcctaggttttgacaaccctcctaccaatgttgtttcgcatttaaatggagattggtttttatttggtgacagtcgttcagattgtaatcatgttgttactaccaacccccgtaattattcttatatggaccttaatcctgccttgtgtggttctggtaaaatatcatctaaagctggcaactccatttttaggagttttcactttactgatttttataattacacaggcgaaggtcaacaaattattttctatgagggtgttaattttacgccttatcatgcctttaaatgcaccacttctggtagtaatgatatttggatgcagaataaaggcttgttttacactcaggtttataagaatatggctgtgtatcgcagccttacttttgttaatgtaccatatgtttataatggctctgcacaatctacagccctttgtaaatctggtagtttagttcttaataaccctgcatatatagctcgtgaagctaattttggggattattattataaggttgaagctgatttttatttgtcaggttgtgacgagtatatcgtaccactttgtattttcaacggcaagtttttgtcgaatacaaagtattatgatgatagtcaatattattttaataaagacactggtgttatttatggtctcaattctactgaaaccattaccactggttttgattttaattgtcattatttagttctaccctctggtaattatttagccatttcaaatgagctattgttaactgttcctactaaagcaatctgtcttaataagcgtaaggattttacgcctgtacaggttgttgactcgcggtggaacaatgccaggcagtctgataacatgacggcagttgcttgtcaacccccgtactgttattttcgtaattctactaccaattatgttggtgtttatgatatcaatcatggggatgctggttttactagcatactcagtggtttgttatatgactcaccttgtttttcgcagcaaggtgtttttaggtatgataatgttagcagtgtctggcctctctacccctatggcagatgccctactgctgctgatattaatacccctgatgtacctatttgtgtgtatgatccgctaccaattattttgcttggcattcttttgagtgttgcggtcataattattgtagttttgttgttatattttatggtggataatggtactaggctgcatgatgcttag

SEQ ID NO: 9886 - protein, 7094 aa, Bovine coronavirus
MSKINKYGLELHWAPEFPWMFEDAEEKLDNPSSSEVDIVCSTTAQKLETGGICPENHVMVDCRRLLKQECCVQSSLIREIVMNTRPYDLEVLLQDALQSREAVLVTPPLGMSLEACYVRGCNPNGWTMGLFRRRSVCNTGRCAVNKHVAYQLYMIDPAGVCFGAGQFVGWVIPLAFMPVQSRKFIVPWVMYLRKCGEKGAYNKDHKRGGFEHVYNFKVEDAYDLVHDEPKGKFSKKAYALIRGYRGVKPLLYVDQYGCDYTGGLADGLEAYADKTLQEMKALFPIWSQELPFDVTVAWHVVRDPRYVMRLQSASTIRSVAYVANPTEDLCDGSVVIKEPVHVYADDSIILRQHNLVDIMSCFYMEADAVVNAFYGVDLKDCGFVMQFGYIDCEQDLCDFKGWVPGNMIDGFACTTCGHVYETGDLLAQSSGVLPVNPVLHTKSAAGYGGFGCKDSFTLYGQTVVYFGGCVYWSPARNIWIPILKSSVKSYDGLVYTGVVGCKAIVKETNLICKALYLDYVQHKCGNLHQRELLGVSDVWHKQLLLNRGVYKPLLENIDYFNMRRAKFSLETFTVCADGFMPFLLDDLVPRAYYLAVSGQAFCDYADKICHAVVSKSKELLDVSLDSLSAAIHYLNSKIVDLAQHFSDFGTSFVSKIVHFFKTFTTSTALAFAWVLFHVLHGAYIVVESDIYFVKNIPRYASAVAQAFRSVAKVVLDSLRVTFIDGLSCFKIGRRRICLSGSKIYEVERGLLHSSQLPLDVYDLTMPSQVQKAKQKPIYLKGSGSDFSLADSVVEVVTTSLTPCGYSEPPKVADKICIVDNVYMAKAGDKYYPVVVDGHVGLLDQAWRVPCAGRRVTFKEQPTVNEIASTPKTIKVFYELDKDFNTILNTACGVFEVDDTVDMEEFYAVVIDAIEEKLSPCKELEGVGAKVSAFLQKLEDNSLFLFDEAGEEVLASKLYCAFTAPEDDDFLEESGVEEDDVEGEETDLTVTSAGEPCVASEQEESSEILEDTLDDGPCVETSDSQVEEDVEMSDFADLESVIQDYENVCFEFYTTEPEFVKVLDLYVPKATRNNCWLRSVLAVMQKLPCQFKDKNLQDLWVLYKQQYSQLFVDTLVNKIPANIVVPQGGYVADFAYWFLTLCDWQCVAYWKCIKCDLALKLKGLDAMFFYGDVVSHVCKCGESMVLIDVDVPFTAHFALKDKLFCAFITKRSVYKAACVVDVNDSHSMAVVDGKQIDDHRVTSITSDKFDFIIGHGMSFSMTTFEIAQLYGSCITPNVCFVKGDIIKVSKRVKAEVVVNPANGHMAHGGGVAKAIAVAAGQQFVKETTDMVKSKGVCATGDCYVSTGGKLCKTVLNVVGPDARTQGKQSYALLERVYKHLNKYDCVVTTLISAGIFSVPSDVSLTYLLGTAEKQVVLVSNNQEDFDLISKCQITAVEGTKKLAERLSFNVGRSIVYETDANKLILSNDVAFVSTFNVLQDVLSLRHDIALDDDARTFVQSNVDVVPEGWRVVNKFYQINGVRTVKYFECPGGIDICSQDKVFGYVQQGSFNKATVAQIKALFLDKVDILLTVDGVNFTNRFVPVGESFGKSLGNVFCDGVNVTKHKCDINYKGKVFFQFDNLSSEDLKAVRSSFNFDQKELLAYYNMLVNCSKWQVVFNGKYFTFKQANNNCFVNVSCLMLQSLNLKFKIVQWQEAWLEFRSGRPARFVSLVLAKGGFKFGDPADSRDFLRVVFSQVDLTGAICDFEIACKCGVKQEQRTGVDAVMHFGTLSREDLEIGYTVDCSCGKKLIHCVRFDVPFLICSNTPASVKLPKGVGSANIFKGDKVGHYVHVKCEQSYQLYDASNVKKVTDVTGNLSDCLYLKNLKQTFKSVLTTYYLDDVKKIEYNPDLSQYYCDGGKYYTQRIIKAQFKTFEKVDGVYTNFKLIGHTICDILNAKLGFDSSKEFVEYKVTEWPTATGDVVLATDDLYVKRYERGCITFGKPVIWLSHEQASLNSLTYFNRPLLVDENKFDVLKVDDVDDGGDISESDAKESKEINIIKLSGVKKPFKVEDSVIVNDDTSEIKYVKSLSIVDVYDMWLTGCRYVVRTANALSMAVNVPTIRKFIKFGMTLVSIPIDLLNLREIKPVFNVVKAVRNKISACFNFIKWLFVLLFGWIKISADNKVIYTTEVASKLTCKLVALAFKNAFLTFKWSVVARGACIIATIFLLWFNFIYANVIFSDFYLPKIGFLPTFVGKIAQWIKSTFSLVTICDLYSIQDVGFKNQYCNGSIACQFCLAGFDMLDNYKAIDVVQYEADRRAFVDYTGVLKIVIELIVSYALYTAWFYPLFALISIQILTTWLPELFMLSTLHWSVRLLVSLANMLPAHVFMRFYIIIASFIKLFILFRHVAYGCSKPGCLFCYKRNRSLRVKCSTIVGGMIRYYDVMANGGTGFCSKHQWNCIDCDSYKPGNTFITVEAALDLSKELKRPIQPTDVAYHTVTDVKQVGCYMRLFYERDGQRTYDDVNASLFVDYSNLLHSKVKGVPNMHVVVVENDADKANFLNAAVFYAQSLFRPILMVDKNLITTANTGTSVTETMFDVYVDTFLSMFDVDKKSLNALIATAHSSIKQGTQICKVLDTFLSCARKSCSIDSDVDTKCLADSVMSAVSAGLELTDESCNNLVPTYLKGDNIVAADLGVLIQNSAKHVQGNVAKIAGVSCIWSVDAFNQLSSDFQHKLKKACCKTGLKLKLTYNKQMANVSVLTTPFSLKGGAVFSYFVYVCFLLSLVCFIGLWCLMPTYTVHKSDFQLPVYASYKVLDNGVIRDVSVEDVCFANKFEQFDQWYESTFGLSYYSNSMACPIVVAVVDQDLGSTVFNVPTKVLRYGYHVLHFITHALSADGVQCYTPHSQISYSNFYASGCVLSSACTMFAMADGSPQPYCYTEGLMQNASLYSSLVPHVRYNLANAKGFIRFPEVLREGLVRIVRTRSMSYCRVGLCEEADEGICFNFNGSWVLNNDYYRSLPGTFCGRDVFDLIYQLFKGLAQPVDFLALTASSIAGAILAVIVVLVFYYLIKLKRAFGDYTSIVFVNVIVWCVNFMMLFVFQVYPTLSCVYAICYFYATLYFPSEISVIMHLQWLVMYGTIMPLWFCLLYISVVVSNHAFWVFAYCRRLGTSVRSDGTFEEMALTTFMITKDSYCKLKNSLSDVAFNRYLSLYNKYRYYSGKMDTAAYREAACSQLAKAMDTFTNNNGSDVLYQPPTASVSTSFLQSGIVKMVNPTSKVEPCIVSVTYGNMTLNGLWLDDKVYCPRHVICSASDMTNPDYTNLLCRVTSSDFTVLFDRLSLTVMSYQMQGCMLVLTVTLQNSRTPKYTFGVVKPGETFTVLAAYNGKPQGAFHVTMRSSYTIKGSFLCGSCGSVGYVLMGDCVKFVYMHQLELSTGCHTGTDFNGDFYGPYKDAQVVQLPVQDYIQSVNFVAWLYAAILNNCNWFVQSDKCSVEDFNVWALSNGFSQVKSDLVIDALASMTGVSLETLLAAIKRLKNGFQGRQIMGSCSFEDELTPSDVYQQLAGIKLQSKRTRLVKGIVCWIMASTFLFSCIITAFVKWTMFMYVTTNMLSITFCALCVISLAMLLVKHKHLYLTMYIIPVLFTLLYNNYLVVYKQTFRGYVYAWLSYYVPSVEYTYTDEVIYGMLLLIGMVFVTLRSINHDLFSFIMFVGRVISVVSLWYMGSNLEEEILLMLASLFGTYTWTTALSMAAAKVIAKWVAVNVLYFTDIPQIKIVLVCYLFIGYIISCYWGLFSLMNSLFRMPLGVYNYKISVQELRYMNANGLRPPKNSFEALMLNFKLLGIGGVPIIEVSQFQSKLTDVKCANVVLLNCLQHLHVASNSKLWQYCSTLHNEILATSDLGVAFEKLAQLLIVLFANPAAVDSKCLTSIEEVCDDYAKDNTVLQALQSEFVNMASFVEYEVAKKNLDEARSSGSANQQQLKQLEKACNIAKSAYERDRAVARKLERMADLALTNMYKEARINDKKSKVVSALQTMLFSMVRKLDNQALNSILDNAVKGCVPLNAIPSLAANTLTIIVPDKSVYDQVVDNVYVTYAGNVWQIQTIQDSDGTNKQLNEISDDCNWPLVIIANRHNEVSATVLQNNELMPAKLKTQVVNSGPDQTCNTPTQCYYNNSNNGKIVYAILSDVDGLKYTKILKDDGNFVVLELDPPCKFTVQDVKGLKIKYLYFVKGCNTLARGWVVGTISSTVRLQAGTATEYASNSSILSLCAFSVDPKKTYLDFIQQGGTPIANCVKMLCDHAGTGMAITVKPDATTNQDSYGGASVCIYCRARVEHPDVDGLCKLRGKFVQVPVGIKDPVSYVLTHDVCQVCGFWRDGSCSCVSTDTTVQSKDTNFLNRVRGTSVDARLVPCASGLSTDVQLRAFDICNASVAGIGLHLKVNCCRFQRVDENGDKLDQFFVVKRTDLTIYNREMECYERVKDCKFVAEHDFFTFDVEGSRVPHIVRKDLTKYTMLDLCYALRHFDRNDCMLLCDILSIYAGCEQSYFTKKDWYDFVENPDIINVYKKLGPIFNRALVSATEFADKLVEVGLVGILTLDNQDLNGKWYDFGDYVIAAPGCGVAIADSYYSYMMPMLTMCHALDCELYVNNAYRLFDLVQYDFTDYKLELFNKYFKHWSMPYHPNTVDCQDDRCIIHCANFNILFSMVLPNTCFGPLVRQIFVDGVPFVVSIGYHYKELGIVMNMDVDTHRYRLSLKDLLLYAADPALHVASASALYDLRTCCFSVAAITSGVKFQTVKPGNFNQDFYDFILSKGLLKEGSSVDLKHFFFTQDGNAAITDYNYYKYNLPTMVDIKQLLFVLEVVYKYFEIYDGGCIPASQVIVNNYDKSAGYPFNKFGKARLYYEALSFEEQDEIYAYTKRNVLPTLTQMNLKYAISAKNRARTVAGVSILSTMTGRMFHQKCLKSIAATRGVPVVIGTTKFYGGWDDMLRRLIKDVDNPVLMGWDYPKCDRAMPNILRIVSSLVLARKHEACCSQSDRFYRLANECAQVLSEIVMCGGCYYVKPGGTSSGDATTAFANSVFNICQAVSANVCALMSCNGNKIEDLSIRALQKRLYSHVYRSDMVDSTFVTEYYEFLNKHFSMMILSDDGVVCYNSDYASKGYIANISAFQQVLYYQNNVFMSESKCWVENDINNGPHEFCSQHTMLVKMDGDDVYLPYPDPSRILGAGCFVDDLLKTDSVLLIERFVSLAIDAYPLVYHENEEYQKVFRVYLEYIKKLYNDLGNQILDSYSVILSTCDGQKFTDESFYKNMYLRSAVMQSVGACVVCSSQTSLRCGSCIRKPLLCCKCCYDHVMATDHKYVLSVSPYVCNAPGCDVNDVTKLYLGGMSYYCEDHKPQYSFKLVMNGMVFGLYKQSCTGSPYIDDFNRIASCKWTDVDDYILANECTERLKLFAAETQKATEEAFKQSYASATIQEIVSERELILSWEIGKVKPPLNKNYVFTGYHFTKNGKTVLGEYVFDKSELTNGVYYRATTTYKLSVGDVFVLTSHSVANLSAPTLVPQENYSSIRFASVYSVLETFQNNVVNYQHIGMKRYCTVQGPPGTGKSHLAIGLAVYYCTARVVYTAASHAAVDALCEKAYKFLNINDCTRIVPAKVRVECYDKFKINDTTRKYVFTTINALPEMVTDIVVVDEVSMLTNYELSVINARIRAKHYVYIGDPAQLPAPRVLLSKGTLEPKYFNTVTKLMCCLGPDIFLGTCYRCPKEIVDTVSALVYENKLKAKNESSSLCFKVYYKGVTTHESSSAVNMQQIYLINKFLKANPLWHKAVFISPYNSQNFAAKRVLGLQTQTVDSAQGSEYDYVIYSQTAETAHSVNVNRFNVAITRAKKGILCVMSNMQLFEALQFTTLTLDKVPQAVETRVQCSTNLFKDCSKSYSGYHPAHAPSFLAVDDKYKATGDLAVCLGIGDSAVTYSRLISLMGFKLDVTLDGYCKLFITKEEAVKRVRAWVGFDAEGAHATRDSIGTNFPLQLGFSTGIDFVVEATGLFADRDGYSFKKAVAKAPPGEQFKHLIPLMTRGQRWDVVRPRIVQMFADHLIDLSDCVVLVTWAANFELTCLRYFAKVGREISCNVCTKRATAYNSRTGYYGCWRHSVTCDYLYNPLIVDIQQWGYIGSLSSNHDLYCSVHKGAHVASSDAIMTRCLAVYDCFCNNINWNVEYPIISNELSINTSCRVLQRVMLKAAMLCNRYTLCYDIGNPKAIACVKDFDFKFYDAQPIVKSVKTLLYSFEAHKDSFKDGLCMFWNCNVDKYPPNAVVCRFDTRVLNNLNLPGCNGGSLYVNKHAFHTKPFSRAAFEHLKPMPFFYYSDTPCVYMDGMDAKQVDYVPLKSATCITRCNLGGAVCLKHAEEYREYLESYNTATTAGFTFWVYKTFDFYNLWNTFTKLQSLENVVYNLVKTGHYTGQAGEMPCAIINDKVVAKIDKEDVVIFINNTTYPTNVAVELFAKRSIRHHPELKLFRNLNIDVCWKHVIWDYARESIFCSNTYGVCMYTDLKFIDKLNVLFDGRDNGALEAFKRSNNGVYISTTKVKSLSMIKGPPRAELNGVVVDKVGDTDCVFYFAVRKEGQDVIFSQFDSLRVSSNQSPQGNLGSNEPGNVGGNDALATSTIFTQSRVISSFTCRTDMEKDFIALDQDLFIQKYGLEDYAFEHIVYGNFNQKIIGGLHLLIGLYRRQQTSNLVIQEFVSYDSSIHSYFITDEKSGGSKSVCTVIDILLDDFVALVKSLNLNCVSKVVNVNVDFKDFQFMLWCNDEKVMTFYPRLQAASDWKPGYSMPVLYKYLNSPMERVSLWNYGKPVTLPTGCMMNVAKYTQLCQYLNTTTLAVPVNMRVLHLGAGSEKGVAPGSAVLRQWLPAGTILVDNDLYPFVSDSVATYFGDCITLPFDCQWDLIISDMYDPITKNIGEYNVSKDGFFTYICHMIRDKLALGGSVAIKITEFSWNAELYKLMGYFAFWTVFCTNANASSSEGFLIGINYLGKPKVEIDGNVMHANYLFWRNSTVWNGGAYSLFDMAKFPLKLAGTAVINLRADQINDMVYSLLEKGKLLVRDTNKEVFVGDSLVNVI

SEQ ID NO: 9887 - protein, 448 aa, Bovine coronavirus
MSFTPGKQSSSRASSGNRSGNGILKWADQSDQSRNVQTRGRRAQPKQTATSQQPSGGNVVPYYSWFSGITQFQKGKEFEFAEGQGVPIAPGVPATEAKGYWYRHNRRSFKTADGNQRQLLPRWYFYYLGTGPHAKDQYGTDIDGVFWVASNQADVNTPADILDRDPSSDEAIPTRFPPGTVLPQGYYIEGSGRSAPNSRSTSRASSRASSAGSRSRADSGNRTPTSGVTPDMADQIASLVLAKLGKDATKPQQVTKQTAKEIRQKILNKPRQKRSPNKQCTVQQCFGKRGPNQNFGGGEMLKLGTSDPQFPILAELAPTAGAFFFGSRLELAKVQNLSGNLDEPQKDVYELRYNGAIRFDSTLSGFETIMKVLNENLNAYQQQDGMMNMSPKPQRQRGQKNGQGENDNISVAAPKSRVQQNKSRELTAEDISLLKKMDEPYTEDTSEI

SEQ ID NO: 9888 - protein, 424 aa, Bovine coronavirus
MFLLPRFVLVSCIIGSLGFDNPPTNVVSHLNGDWFLFGDSRSDCNHVVTTNPRNYSYMDLNPALCDSGKISSKAGNSIFRSFHFTDFYNYTGEGQQIIFYEGVNFTPYHAFKCTTSGSNDIWMQNKGLFYTQLYKNMAVYRSLTFVNVPYVYNGSAQSTALCKSGSLVLNNPAYIAREANFGDYYYKVEADFYLSGCDEYIVPLCIFNGKFLSNTKYYDDSQYYFNKDTGVIYGLNSTETITTGFDFNCHYLVLPSGNYLAISNELLLTVPTKAICLNKRKDFTPVQVVDSRWNNAMQSDNMTAVACQPPYCYFRNSTTNYVGVYDINHGDAGFTSILSGLLYDSPCFSQQGVFRYDNVSSVWPLYPYGRCPTAADINTPDVPICVYDPLPIILLGILLGVAVIIIVVLLLYFMVDNGTRLHDA

SEQ ID NO: 9889 - protein, 84 aa, Bovine coronavirus; identical to SEQ ID NO: 6066

SEQ ID NO: 9890 - protein, 230 aa, Bovine coronavirus; identical to SEQ ID NO: 6067

SEQ ID NO: 9891 - protein, 1363 aa, Bovine coronavirus; identical to SEQ ID NO: 6065

SEQ ID NO: 9892 - DNA, 213 bp, Bovine coronavirus
gattgcgagcgatttgcgtgcgtgcatcccgcttcactgatctcttgttagatcttttcataatctaaactttataaaaacatccactccctgtagtctatgcctgtgggcgtagatttttcatagtggtgtctatattcatttctgctgttaacagctttcagccagggacgtgttgtatcctaggcagtggcccacccataggtcacaatg

SEQ ID NO: 9893 - DNA, 289 bp, Bovine coronavirus
gagaatgaaccttatgtcggcacctggtggtaacccctcgcaggaaagtcgggataaggcactctctatcagaatggatgtcttgctgctataatagatagagaaggttatagcagactatagattaattagttgaaagttttgtgtggtaatgtatagtgttggagaaagtgaaagacttgcggaagtaattgccgacaagtgcccaaggggaagagccagcatgttaagttaccatccagtaattagtaaatgaatgaagttaattatggccaattggaagaatcac

SEQ ID NO: 9894 - DNA, 1356 bp, Murine hepatitis virus
atgtcttttgttcctgggcaagaaaatgccggtagcagaagctcctctggaaaccgcgctggtaatggcatcctcaagaagaccacttgggctgaccaaaccgagcgtggaaatagaggcagaaggaaccatcccaagcagactgcaactactcagcccaatgccgggagtgtggttccccattactcttggttttcgggcatcacccagtttcaaaagggaaaggagttccagtttgcacaaggacagggagtgcctattgccagtggaatccccgcttcagagcaaaagggatattggtatagacacaaccgacgttcttttaaaacacctgatggccagcacaagcagctactgcccagatggtatttttactatcttggaacagggccccatgctggcgcagagtatggcgacgatatcgaaggagttgtctgggtcgcaagccaacaggccgacactaagaccactgccgatgttgttgaaagggacccaagcagtcatgaggctattcctactaggtttgcgcccggcacggtattgcctcagggcttttatgtagaaggctcgggaaggtctgcacctgctagtcgatctggttcgcggtcacaatcccgtgggccaaataatcgcgctagaagcagttccaaccagcgccagcctgcctctgctgtaaaacctgacatggccgaagaaattgctgctcttgttttggctaagcttggtaaagatgccggccagcccaagcaggtaactaagcaaagcgccaaagaagtcaggcagaaaattttaactaagcctcgtcaaaagaggactccaaacaagcagtgcccagtgcagcagtgttttgggaagagaggccctaatcagaactttggaggctctgaaatgttaaaacttggaactagtgatccgcagttccccattcttgcagagttggctccaacacctagtgccttcttctttggatctaaattagaattggtcaaaaagaactctggtggtgctgatgaacccaccaaagatgtttatgaattgcagtattcaggtgcaattagatttgatagtactctacccggttttgagactatcatgaaagtgttgactgagaatttgaatgcctaccaggaccaagctggtagtgtagatctagtgagcccaaagcctccaagaagaggtcgtagacaggctcaagaaaagaaagatgaagtagataatgtaagcgttgcaaagctcaaaagcttggtgcagcgaaatgtaagtagagaattaacccccgaggatcgtagcctgctggctcagatcctagacgatggcgttgtgccagatgggttggaagatgactctaatgtgtaa

SEQ ID NO: 9895 - DNA, 687 bp, Murine hepatitis virus
atgactagtaccactcaggctccacagcctgtttatcagtggacggctgatgaggcaattcgattccttaaggaatggaatttctctctcggcattatactactttttgttactatcatactacagttcggttacacgagccgtagcatgtttgtttatgttgtgaaaatgatacttttgtggcttatgtggccactaactattgttttgtgtatttttaactgcgtctatgcgctaaataatgtgtatcttggattttctatagtgtttactatagtgtccattataatgtggattatgtattttgttaatagcatcaggttgtttatcaggactggcagctggtggagcttcaaccccgaaacaaacaacctaatgtgtatagatatgaaaggtactgtgtatgttagacccattatagaggattaccatacactaacagccactatcattcgtggtcacctctatatgcaaggtgttaagctaggcactggcttctctttgtctgatttgcctgcttatgttacagttgctaaggtgtctcacctttgcacttataagcgcgcattcttagacaaggtagacggtgttagcggttttgctgtttatgtgaagtccaaggtcggaaattaccgactgccctcaaataaaccgagtggcatggacaccgcattgttgagaatctaa

SEQ ID NO: 9896 - DNA, 886 bp, Murine hepatitis virus
atgggcaataaagctcgattttatgcccgagtgtatgagaagatggcccaatataggagcctatcgtttgttaatgtgtcttatgcctatggaggtaatgcaaagcccgcctccatttgcaaagacaatactttaacactcaataaccccaccttcatatcgaaggagtctaattatgttgattagtaccgctctgtggtttaatggccattccaagggcagctcttcggatgctgccaataaatattatactgactctcagagttactataatatggatattggtgtcttatatgggttcaattcgaccttggatgttggcaacactgctaaggatccgggtcttgatctcacttgcaggtatcttgcattgactcctggtaattataaggctgtgtccttagaatatttgttaagcttaccctcaaaggctatttgcctccataagacaaagcgctttatgcctgtgcaggtagttgactcaaggtggagtagcatccgccagtcagacaatatgaccgctgcagcctgtcagctgccatattgtttctttcgcaacacatctgcgaattatagtggtggcacacatgatgcgcaccatggtgattttcatttcaggcagttattgtctggtttgttatataatgtttcctgtattgcccagcagggtgcatttctttataataatgttagttcctcttggccagcctatgggtacggtcattgtccaacggcagctaacattggttatatggcacctgtttgtatctatgaccctctcccggtcatactgctaggtgtgttattgggtatagctgtgttgattattgtgtttttgatgttttattttatgacggatagcggtgttagattgcatgaggcataa

SEQ ID NO: 9897 - protein, 7176 aa, Murine hepatitis virus
MAKMGKYGLGFKWAPEFPWMLPNASEKLGNPERSEEDGFCPSAAQEPKVKGKTLVNHVRVNCSRLPALECCVQSAIIRDIFVDEDPQKVEASTMMALQFGSAVLVKPSKRLSIQAWTNLGVLPKTAAMGLFKRVCLCNTRECSCDAHVAFHLFTVQPDGVCLGNGRFIGWFVPVTAIPEYAKQWLQPWSILLRKGGNKGSVTSGHFRRAVTMPVYDFNVEDACEEVHLNPKGKYSCKAYALLKGYRGVKPILFVDQYGCDYTGCLAKGLEDYGDLTLSEMKELFPVWRDSLDSEVLVAWHVDRDPRAAMRLQTLATVRCIDYVGQPTEDVVDGDVVVREPAHLLAANAIVKRLPRLVETMLYTDSSVTEFCYKTKLCECGFITQFGYVDCCGDTCDFRGWVAGNMMDGFPCPGCTKNYMPWELEAQSSGVIPEGGVLFTQSTDTVNRESFKLYGHAVVPFGSAVYWSPCPGMWLPVIWSSVKSYSGLTYTGVVGCKAIVQETDAICRSLYMDYVQHKCGNLEQRAILGLDDVYHRQLLVNRGDYSLLLENVDLFVKRRAEFACKFATCGDGLVPLLLDGLVPRSYYLIKSGQAFTSMMVNFSHEVTDMCMDMALLFMHDVKVATKYVKKVTGKLAVRFKALGVAVVRKITEWFDLAVDIAASAAGWLCYQLVNGLFAVANGVITFVQEVPELVKNFVDKFKAFFKVLIDSMSVSILSGLTVVKTASNRVCLAGSKVYEVVQKSLSAYVMPVGCSEATCLVGEIEPAVFEDDVVDVVKAPLTYQGCCKPPTSFEKICIVDKLYMAKCGDQFYPVVVDNDTVGVLDQCWRFPCAGKKVEFNDKPKVRKIPSTRKIKITFALDATFDSVLSKACSEFEVDKDVTLDELLDVVLDAVESTLSPCKEHDVIGTKVCALLDRLAGDYVYLFDEGGDEVIAPRMYCSFSAPDDEDCVAADVVDADENQDDDAEDSAVLVADTQEEDGVAKGQVEADSEICVAHTGSQEELAEPDAVGSQTPIASAEETEVGEASDREGIAEAKATVCADAVDACPDQVEAFEIEKVEDSILDELQTELNAPADKTYEDVLAFDAVCSEALSAFYAVPSDETHFKVCGFYSPAIERTNCWLRSTLIVMQSLPLEFKDLEMQKLWLSYKAGYDQCFVDKLVKSVPKSIILPQGGYVADFAYFFLSQCSFKAYANWRCLECDMELKLQGLDAMFFYGDVVSHMCKCGNSMTLLSADIPYTLHFGVRDDKFCAFYTPRKVFRAACAVDVNDCHSMAVVEGKQIDGKVVTKFIGDKFDFMVGYGMTFSMSPFELAQLYGSCITPNVCFVKGDVIKVVRLVNAEVIVNPANGRMAHGAGVAGAIAEKAGSAFIKETSDMVKAQGVCQVGECYESAGGKLCKKVLNIVGPDARGHGKQCYSLLERAYQHINKCDNVVTTLISAGIFSVPTDVSLTYLLGVVTKNVILVSNNQDDFDVIEKCQVTSVAGTKALSLQLAKNLCRDVKFVTNACSSLFSESCFVSSYDVLQEVEALRHDIQLDDDARVFVQANMDCLPTDWRLVNKFDSVDGVRTIKYFECPGGIFVSSQGKKFGYVQNGSFKEASVSQIRALLANKVDVLCTVDGVNFRSCCVAEGEVFGKTLGSVFCDGINVTKVRCSAIYKGKVFFQYSDLSEADLVAVKDAFGFDEPQLLKYYTMLGMCKWPVVVCGNYFAFKQSNNNCYINVACLMLQHLSLKFPKWQWQEAWNEFRSGKPLRFVSLVLAKGSFKFNEPSDSIDFMRVVLREADLSGATCNLEFVCKCGVKQEQRKGVDAVMHFGTLDKGDLVRGYNIACTCGSKLVHCTQFNVPFLICSNTPEGRKLPDDVVAANIFTGGSVGHYTHVKCKPKYQLYDACNVNKVSEAKGNFTDCLYLKNLKQTFSSVLTTFYLDDVKCVEYKPDLSQYYCESGKYYTKPIIKAQFRTFEKVDGVYTNFKLVGHSIAEKLNAKLGFDCNSPFVEYKITEWPTATGDVVLASDDLYVSRYSSGCITFGKPVVWLGHEEASLKSLTYFNRPSVVCENKFNVLPVDVSEPTDKGPVPAAVLVTGVPGADASAGAGIAKEQKACASASVEDQVVTEVRQEPSVSAADVKEVKLNGVKKPVKVEGSVVVNDPTSETKVVKSLSIVDVYDMFLTGCKYVVWTANELSRLVNSPTVREYVKWGMGKIVTPAKLLLLRDEKQEFVAPKVVKAKAIACYCAVKWFLLYCFSWIKFNTDNKVIYTTEVASKLTFKLCCLAFKNALQTFNWSVVSRGFFLVATVFLLWFNFLYANVILSDFYLPNIGPLPTFVGQIVAWFKTTFGVSTICDFYQVTDLGYRSSFCNGSMVCELCFSGFDMLDNYDAINVVQHVVDRRLSFDYISLFKLVVELVIGYSLYTVCFYPLFVLIGMQLLTTWLPEFFMLETMHWSARLFVFVANMLPAFTLLRFYIVVTAMYKVYCLCRHVMYGCSKPGCLFCYKRNRSVRVKCSTVVGGSLRYYDVMANGGTGFCTKHQWNCLNCNSWKPGNTFITHEAAADLSKELKRPVNPTDSAYYSVTEVKQVGCSMRLFYERDGQRVYDDVNASLFVDMNGLLHSKVKGVPETHVVVVENEADKAGFLGAAVFYAQSLYRPMLMVEKKLITTANTGLSVSRTMFDLYVDSLLNVLDVDRKSLTSFVNAAHNSLKEGVQLEQVMDTFIGCARRKCAIDSDVETKSITKSVMSAVNAGVDFTDESCNNLVPTYVKSDTIVAADLGVLIQNNAKHVQANVAKAANVACIWSVDAFNQLSADLQHRLRKACSKTGLKIKLTYNKQEANVPILTTPFSLKGGAVFSRMLQWLFVANLICFIVLWALMPTYAVHKSDMQLPLYASFKVIDNGVLRDVSVTDACFANKFNQFDQWYESTFGLAYYRNSKACPVVVAVIDQDIGHTLFNVPTTVLRYGFHVLHFITHAFATDSVQCYTPHMQIPYDNFYASGCVLSSLCTMLAHADGTPHPYCYTGGVMHNASLYSSLAPHVRYNLASSNGYIRFPEVVSEGIVRVVRTRSMTYCRVGLCEEAEEGICFNFNRSWVLNNPYYRAMPGTFCGRNAFDLIHQVLGGLVRPIDFFALTASSVAGAILAIIVVLAFYYLIKLKRAFGDYTSVVVINVIVWCINFLMLFVFQVYPTLSCLYACFYFYTTLYFPSEISVVMHLQWLVMYGAIMPLWFCIIYVAVVVSNHALWLFSYCRKIGTEVRSDGTFEEMALTTFMITKESYCKLKNSVSDVAFNRYLSLYNKYRYFSGKMDTAAYREAACSQLAKAMETFNHNNGNDVLYQPPTASVTTSFLQSGIVKMVSPTSKVEPCIVSVTYGNMTLNGLWLDDKVYCPRHVICSSADMTDPDYPNLLCRVTSSDFCVMSGRMSLTVMSYQMQGCQLVLTVTLQNPNTPKYSFGVVKPGETFTVLAAYNGRPQGAFHVTLRSSHTIKGSFLCGSCGSVGYVLTGDSVRFVYMHQLELSTGCHTGTDFSGNFYGPYRDAQVVQLPVQDYTQTVNVVAWLYAAIFNRCNWFVQSDSCSLEEFNVWAMTNGFSSIKADLVLDALASMTGVTVEQVLAAIKRLHSGFQGKQILGSCVLEDETPSDVYQQLAGVKLQSKRTRVIKGTCCWILASTFLFCSIISAFVKWTMFMYVTTHMLGVTLCALCFVSFAMLLIKHKHLYLTMYIMPVLCTFYTNYLVVYKQSFRGLAYAWLSHFVPAVDYTYMDEVLYGVVLLVAMVFVTMRSINHDVFSIMFLVGRLVSLVSMWYFGANLEEEVLLFLTSLFGTYTWTTMLSLATAKVIAKWLAVNVLYFTDVPQIKLVLLSYLCIGYVCCCYWGILSLLNSIFRMPLGVYNYKISVQELRYMNANGLRPPRNSFEALMLNFKLLGIGGVPVIEVSQIQSRLTDVKCANVVLLNCLQHLHIASNSKLWQYCSTLHNEILATSDLSMAFDKLAQLLVVLFANPAAVDSKCLASIEEVSDDYVRDNTVLQALQSEFVNMASFVEYELAKKNLDEAKASGSANQQQIKQLEKACNIAKSAYERDRAVARKLERMADLALTNMYKEARINDKKSKVVSALQTMLFSMVRKLDNQALNSILDNAVKGCVPLNAIPSLTSNTLTIIVPDKQVFDQVVDNVYVTYAGNVWHIQFIQDADGAVKQLNEIDVNSTWPLVIAANRHNEVSTVVLQNNELMPQKLRTQVVNSGSDMNCNTPTQCYYNTTGTGKIVYAILSDCDGLKYTKIVKEDGNCVVLELDPPCKFSVQDVKGLKIKYLYFVKGCNTLARGWVVGTLSSTVRLQAGTATEYASNSAILSLCAFSVDPKKTYLDYIKQGGVPVTNCVKMLCDHAGTGMAITIKPEATTNQDSYGGASVCIYCRSRVEHPDVDGLCKLRGKFVQVPLGIKDPVSYVLTHDVCQVCGFWRDGSCSCVGTGSQFQSKDTNFLNRIRGTSVNARLVPCASGLDTDVQLRAFDICNANRAGIGLYYKVNCCRFQRVDEDGNKLDKFFVVKRTNLEVYNKEKECYELTKECGVVAEHEFFTFDVEGSRVPHIVRKDLSKFTMLDLCYALRHFDRNDCSTLKEILLTYAECEESYFQKKDWYDFVENPDIINVYKKLGPIFNRALLNTAKFADALVEAGLVGVLTLDNQDLYGQWYDFGDFVKTVPGCGVAVADSYYSYMMPMLTMCHALDSELFVNGTYREFDLVQYDFTDFKLELFTKYFKHWSMTYHPNTCECEDDRCIIHCANFNILFSMVLPKTCFGPLVRQIFVDGVPFVVSIGYHYKELGVVMNMDVDTHRYRLSLKDLLLYAADPALHVASASALLDLRTCCFSVAAITSGVKFQTVKPGNFNQDFYEFILSKGLLKEGSSVDLKHFFFTQDGNAAITDYNYYKYNLPTMVDIKQLLFVLEVVNKYFEIYEGGCIPATQVIVNNYDKSAGYPFNKFGKARLYYEALSFEEQDEIYAYTKRNVLPTLTQMNLKYAISAKNRARTVAGVSILSTMTGRMFHQKCLKSIAATRGVPVVIGTTKFYGGWDDMLRRLIKDVDSPVLMGWDYPKCDRAMPNILRIVSSLVLARKHDSCCSHTDRFYRLANECAQVLSEIVMCGGCYYVKPGGTSSGDATTAFANSVFNICQAVSANVCSLMACNGHKIEDLSIRELQKRLYSNVYRADHVDPAFVSEYYEFLNKHFSMMILSDDGVVCYNSEFASKGYIANISAFQQVLYYQNNVFMSEAKCWVETDIEKGPHEFCSQHTMLVKMDGDEVYLPYPDPSRILGAGCFVDDLLKTDSVLLIERFVSLAIDAYPLVYHENPEYQNVFRVYLEYIKKLYNDLGNQILDSYSVILSTCDGQKFTDETFYKNMYLRSAVLQSVGACVVCSSQTSLRCGSCIRKPLLCCKCAYDHVMSTDHKYVLSVSPYVCNSPGCDVNDVTKLYLGGMSYYCEDHKPQYSFKLVMNGMVFGLYKQSCTGSPYIEDFNKIASCKWTEVDDYVLANECTERLKLFAAETQKATEEAFKQCYASATIREIVSDRELILSWEIGKVRPPLNKNYVFTGYHFTNNGKTVLGEYVFDKSELTNGVYYRATTTYKLSVGDVFILTSHAVSSLSAPTLVPQENYTSIRFASVYSVPETFQNNVPNYQHIGMKRYCTVQGPPGTGKSHLAIGLAVYYCTARVVYTAASHAAVDALCEKAHKFLNINDCTRIVPAKVRVDCYDKFKVNDTTRKYVFTTINALPELVTDIIVVDEVSMLTNYELSVINSRVRAKHYVYIGDPAQLPAPRVLLNKGTLEPRYFNSVTKLMCCLGPDIFLGTCYRCPKEIVDTVSALVYNNKLKAKNDNSSMCFKVYYKGQTTHESSSAVNMQQIHLISKFLKANPSWSNAVFISPYNSQNYVAKRVLGLQTQTVDSAQGSEYDFVIYSQTAETAHSVNVNRFNVAITRAKKGILCVMSSMQLFESLNFTTLTLDKINNPRLQCTTNLFKDCSRSYVGYHPAHAPSFLAVDDKYKVGGDLAVCLNVADSAVTYSRLISLMGFKLDLTLDGYCKLFITRDEAIKRVRAWVGFDAEGAHAIRDSIGTNFPLQLGFSTGIDFVVEATGMFAERDGYVFKKAAARAPPGEQFKHLIPLMSRGQKWDVVRIRIVQMLSDHLVDLADSVVLVTWAASFELTCLRYFAKVGREVVCSVCTKRATCFNSRTGYYGCWRHSYSCDYLYNPLIVDIQQWGYTGSLTSNHDPICSVHKGAHVASSDAIMTRCLAVHDCFCKSVNWNLEYPIISNEVSVNTSCRLLQRVMFRAAMLCNRYDVCYDIGNPKGLACVKGYDFKFYDASPVVKSVKQFVYKYEAHKDQFLDGLCMFWNCNVDKYPANAVVCRFDTRVLNKLNLPGCNGGSLYVNKHAFHTSPFTRAAFENLKPMPFFYYSDTPCVYMEGMESKQVDYVPLRSATCITRCNLGGAVCLKHAEEYREYLESYNTATTAGFTFWVYKTFDFYNLWNTFTRLQSLENVVYNLVNAGHFDGRAGELPCAVIGEKVIAKIQNEDVVVFKNNTPFPTNVAVELFAKRSIRPHPELKLFRNLNIDVCWSHVLWDYAKDSVFCSSTYKVCKYTDLQCIESLNVLFDGRDNGALEAFKKCRNGVYINTTKIKSLSMIKGPQRADLNGVVVEKVGDSDVEFWFAVRKDGDDVIFSRTGSLEPSHYRSPQGNPGGNRVGDLSGNEALARGTIFTQSRLLSSFTPRSEMEKDFMDLDDDVFIAKYSLQDYAFEHVVYGSFNQKIIGGLHLLIGLARRQQKSNLVIQEFVTYDSSIHSYFITDENSGSSKSVCTVIDLLLDDFVDIVKSLNLKCVSKVVNVNVDFKDFQFMLWCNEEKVMTFYPRLQAAADWKPGYVMPVLYKYLESPLERVNLWNYGKPITLPTGCMMNVAKYTQLCQYLSTTTLAVPANMRVLHLGAGSDKGVAPGSAVLRQWLPAGSILVDNDVNPFVSDSVASYYGNCITLPFDCQWDLIISDMYDPLTKNIGEYNVSKDGFFTYLCHLIRDKLALGGSVAIKITEFSWNAELYSLMGKFAFWTIFCTNVNASSSEGFLIGINWLNKTRTEIDGKTMHANYLFWRNSTMWNGGAYSLFDMSKFPLKAAGTAVVSLKPDQINDLVLSLIEKGKLLVRDTRKEVFVGDSLVNVK

SEQ ID NO: 9898 - protein, 451 aa, Murine hepatitis virus
MSFVPGQENAGSRSSSGNRAGNGILKKTTWADQTERGNRGRRNHPKQTATTQPNAGSVVPHYSWFSGITQFQKGKEFQFAQGQGVPIASGIPASEQKGYWYRHNRRSFKTPDGQHKQLLPRWYFYYLGTGPHAGAEYGDDIEGVVWVASQQADTKTTADVVERDPSSHEAIPTRFAPGTVLPQGFYVEGSGRSAPASRSGSRSQSRGPNNRARSSSNQRQPASAVKPDMAEEIAALVLAKLGKDAGQPKQVTKQSAKEVRQKILTKPRQKRTPNKQCPVQQCFGKRGPNQNFGGSEMLKLGTSDPQFPILAELAPTPSAFFFGSKLELVKKNSGGADEPTKDVYELQYSGAIRFDSTLPGFETIMKVLTENLNAYQDQAGSVDLVSPKPPRRGRRQAQEKKDEVDNVSVAKPKSLVQRNVSRELTPEDRSLLAQILDDGVVPDGLEDDSNV

SEQ ID NO: 9899 - protein, 431 aa, Murine hepatitis virus
MARTDAMAPRTLLLVLSLGYAFGFNEPLNVVSHLNDDWFLFGDSRSDCNHINNLSQQNYNYMDINPELCKSGKISAKAGNSLFKSFHFTDFYNYTGEGSQIIFYEGVNFTPYVGFKCLNNGDNNRWMGNKARFYTQLYQKMAHYRSLSVINITYTYNGSAGPVSMCKHIANGVTLTLNNPTFIGKEVSKPDYYYESEANFTLQGCDEFIVPLCVFNGQYLSSKLYYDDSQYYYNVDTGVLYGFNSTLNITSGLDLTCIYLALTPGNYISISNELLLTVPSKAICLRKPKAFTPVQVVDSRWHSNRQSDNMTAIACQLPYCYFRNTTSDYNGVYDSHHGDAGFTSILAGLMYNVSCLAQQGAFVYNNVSSSWPQYPYGHCPTAANIVFMAPVCMYDPLPVILLGVLLGIAVLIIVFLMFYFMTDSGVRLHEA

SEQ ID NO: 9900 - protein, 88 aa, Murine hepatitis virus
MFNLFLTDTVWYVGQIIFIVAVCLMVTITVVAFLASIKLCIQLCGLCNTLVLSPSIYLYDRSKQLYKYYNEEVRPPPLEVDDIIIQTL

SEQ ID NO: 9901 - protein, 228 aa, Murine hepatitis virus
MTSTTQAPQPVYQWTADEAIRFLKEWNFSLGIILLFVTIILQFGYTSRSMFVYVVKMILLWLMWPLTIVLCIFNCVYALNNVYLGFSIVFTIVSIIMWIMYFVNSIRLFIRTGSWWSFNPETNNLMCIDMKGTVYVRPIIEDYHTLTATIIRGHLYMQGVKLGTGFSLSDLPAYVTVAKVSHLCTYKRAFLDKVDGVSGFAVYVKSKVGNYRLPSNKPSGMDTALLRI

SEQ ID NO: 9902 - protein, 1328 aa, Murine hepatitis virus
MLFVFILFLPSCLGYIGDFRCIQLVNSNGANVSAPSISTETVEVSQGLGTYYVLDRVYLNATLLLTGYYPVDGSKFRNLALTGTNSVSLSWFQPPYLSQFNDGIFAKVQNLKTSTPSGATAYFPTIVIGSLFGYTSYTVVIEPYNGVIMASVCQYTICQLPYTDCKPNTNGNKLIGFWHTDVKPPICVLKRNFTLNVNADAFYFHFYQHGGTFYAYYADKPSATTFLFSVYIGDILTQYYVLPFICNPTAGSTFAPRYWVTPLVKRQYLFNFNQKGVITSAVDCASSYTSEIKCKTQSMLPSTGVYELSGYTVQPVGVVYRRVANLPACNIEEWLTARSVPSPLNWERKTFQNCNFNLSSLLRYVQAESLFCNNIDASKVYGRCFGSISVDKFAVPRSRQVDLQLGNSGFLQTANYKIDTAATSCQLHYTLPKNNVTINNHNPSSWNRRCGFNDAGVFGKNQHDVVYAQQCFTVRSSYCPCAQPGKVSPCTTRTKKVLKPKSAFVNVGDHCEGLGVLEDNCGNADPHKGCICANNSFIGWSHDTCLVNDRCQIFANILLNGINSGTTCSTDLQLPNTEVVTGICVKYDLYGITGQGVFKEVKADYYNSWQTLLYDVNGNLNGFRDLTTNKTYTIRSCYSGRVSAAFHKDAPEPALLYRNINCSYVFSNNISREENPLNYFDSYLGCVVNADNRTDEALPNCDLRMGAGLCVDYSKSRRAHRLVSTGYRLTTFEPYTPMLVNDSVQSVDGLYEMQIPTNFTIGHHEEFIQTRSPKVTIDCAAFVCGDNTACRQQLVEYGSFCVNVNAILNEVNNLLDNMQLQVASALMQGVTISSRLPDGISGPIDDINFSPLLGCIGSTCAEDGNGPSAIRGRSAIEDLLFDKVKLSDVGFVEAYNNCTGGQGVRDLLCVQSFNGIKVLPPVLSESQISGYTTGATAAAMFPPWSAAAGVPFRLSVQYRINGLGVTMNVLSENQKMIASAFNNALGAIQDGFDATNSALGKIQSVVNANAEALNNLLNQLSNRFGAISASLQEILTRLEAVEAKAQIDRLINGRLTALNAYISKQLSDSTLIKVSAAQAIEKVNECVKSQTTRINFCGNGNHILSLVQNAPYGLYFIHFSYVPISFTTANVSPGLCISGDRGLAPKAGYFVQDDGEWKFTGSSYYYPEPITDKNSVIMSSCAVNYTKAPEVFLNTSIPNPPDFKEELDKWFKNQTSIAPDLSLDFEKLNVTLLDLTYEMNRIQDAIKKLNESYINLKEVGTYEMYVKWPWYVWLLIGLAGVAVCVLLFFICCCTGCGSCCFKKCGNCCDEYGGHQDSIVIHNISSHED

SEQ ID NO: 9903 - DNA, 1230 bp, Avian infectious bronchitis virus
atggcgagcggtaagacaactgggaagacagacgccccagcgccagtcatcaaactaggagggccaaaaccacctaaagttggttcttctggaaatgcatcttggtttcaagcactaaaagccaagaagttaaattcacctcctcctaagtttgaaggtagcggcgttcctgataatgaaaatcttaaattaagccagcaacatgggtactggagacgtcaagccaggtacaagccaggtaaaggcggaagaaaatcagtcccagatgcttggtacttctattacactggaacaggaccagccgctgacctgaattggggtgatagccaagatggtatagtgtgggtttctgcaaagggtgctgatactaaatctagatctaaccagggtacaagggatcctgataagtttgaccaatacccgctacgattctcagatggaggacctgatggtaatttccgttgggacttcattccaataaatcgtggtaggagtggaagatcaacagcggcttcatcagcagcatctagtagagcaccgtcgcgtgatggctcgcgtggacgtagaagcggagctgaagatgatcttatagctcgtgcagcaaagatcattcaggatcagcagaagaagggttctcgcattactaaagctaaggccgatgaaatggctcatcgccggtattgtaagcgtactatcccacctggttataaggttgatcaagtatttggtccccgtactaaaggtaaggagggaaattttggtgatgacaagatgaatgaggagggtattaaggatgggcgcgttatagcaatgctcaacctagtccctagcagccatgcttgtctttttggaagtagagtgacgcccaaacttcaaccagatgggctgcacttgagatttgaatttattactgtggtttcacgtgatgatccgcagtttgataattatgtgaaaatttgtgatcagtgtgtcgatggtgtagggacgcgtccaaaagacgatgaaccgagaccaaagtcacgcccaaattcaagacctgctacaagaacaagttctccagcgccaagacaacagcgtcaaaagaaggagaagaagtcaaagaagcaggatgatgaagtagataaggcattgacctcagatgaggagaggaacaatgcacagctggaatttgatgatgaacccaaggtgattaactggggggattcagcacttggagagaatgagttgtaa

SEQ ID NO: 9904 - DNA, 600 bp, Avian infectious bronchitis virus
atgtccaacgaaacaaattgtactcttgactttgaacagtcagttgagctttttaaagagtataatttatttataactgcattcttgttgttcttaaccataatacttcagtatggttatgcaacaagaagtaagtttatttatatacttaaaatgatagtgttatggtgcttttggccccttaacattgcagtaggtgtaatttcatgtatatacccaccaaacacaggaggtcttgtcgcagcgataatacttactgtgtttgcgtgtctttcttttgtaggttattggatccagagtattagactctttaagcggtgtagatcttggtggtcatttaacccagaatctaacgccgtaggttcaatactcctaactaatggtcaacaatgtaattttgctatagagagtgtgccgatggtgctttctcctattataaagaatggtgttctttattgtgagggtcagtggcttgctaaatgtgaaccagaccacttgcctaaagacatatttgtatgcacaccagatagacgtaatatctatcgtatggtgcagaaatacattggtgaccaaagcggaaataagaaaaggtttgctaca

SEQ ID NO: 9905 - protein, 6629 aa, Avian infectious bronchitis virus
MASSLKQGVSPKPRDVILVSKDIPEQLCDALFFYTSHNPKDYADAFAVRQKFDRSLQTGKQFKFETVCGLFLLKGVDKITPGVPAKVLKATSKLADLEDIFGVSPLARKYRELLKTACQWSLTVEALDVRAQTLDEIFDPTEILWLQVAAKIHVSSMAMRRLVGEVTAKVMDALGSNLSALFQIVKQQIARIFQKALAIFENVNELPQRIAALKMAFAKCARSITVVVVERTLVVKEFAGTCLASINGAVAKFFEELPNGFMGSKIFTTLAFFKEAAVRVVENIPNAPRGTKGFEVVGNAKGTQVVVRGMRNDLTLLDQKADIPVEPEGWSAILDGHLCYVFRSGDRFYAAPLSGNFALSDVHCCERVVCLSDGVTPEINDGLILAAIYSSFSVSELVTALKKGEPFKFLGHKFVYAKDAAVSFTLAKAATIADVLRLFQSARVIAEDVWSSFTEKSFEFWKLAYGKVRNLEEFVKTYVCKAQMSIVILAAVLGEDIWHLVSQVIYKLGVLFTKVVDFCDKHWKGFCVQLKRAKLIVTETFCVLKGVAQHCFQLLLDAIHSLYKSFKKCALGRIHGDLLFWKGGVHKIVQDGDEIWFDAIDSVDVEDLGVVQEKSIDFEVCDDVTLPENQPGHMVQIEDDGKNYMFFRFKKDENIYYTPMSQLGAINVVCKAGGKTVTFGETTVQEIPPPDVVPIKVSIECCGEPWNTIFKKAYKEPIEVDTDLTVEQLLSVIYEKMCDDLKLFPEAPEPPPFENVALVDKNGKDLDCIKSCHLIYRDYESDDDIEEEDAEECDTDSGEAEECDTNSECEEEDEDTKVLALIQDPASIKYPLPLDEDYSVYNGCIVHKDALDVVNLPSGEETFVVNNCFEGAVKPLPQKVVDVLGDWGEAVDAQEQLCQQEPLQHTFEEPVENSTGSSKTMTEQVVVEDQELPVVEQDQDVVVYTPTDLEVAKETAEEVDEFILIFAVPKEEVVSQKDGAQIKQEPIQVVKPQREKKAKKFKVKPATCEKPKFLEYKTCVGDLTVVIAKALDEFKEFCIVNAANEHMTHGSGVAKAIADFCGLDFVEYCEDYVKKHGPQQRLVTPSFVKGIQCVNNVVGPRHGDNNLHEKLVAAYKNVLVDGVVNYVVPVLSLGIFGVDFKMSIDAMREAFEGCTIRVLLFSLSQEHIDYFDVTCKQKTIYLTEDGVKYRSIVLKPGDSLGQFGQVYAKNKIVFTADDVEDKEILYVPTTDKSILEYYGLDAQKYVIYLQTLAQKWNVQYRDNFLILEWRDGNCWISSAIVLLQAAKIRFKGFLTEAWAKLLGGDPTDFVAWCYASCTAKVGDFSDANWLLANLAEHFDADYTNAFLKKRVSCNCGIKSYELRGLEACIQPVRATNLLHFKTQYSNCPTCGANNTDEVIEASLPYLLLFATDGPATVDCDEDAVGTVVFVGSTNSGHCYTQAAGQAFDNLAKDRKFGKKSPYITAMYTRFAFKNETSLPVAKQSKGKSKSVKEDVSNLATSSKASFDNLTDFEQWYDSNIYESLKVQESPDNFDKYVSFTTKEDSKLPLTLKVRGIKSVVDFRSKDGFIYKLTPDTDENSKAPVYYPVLDAISLKAIWVEGNANFVVGHPNYYSKSLHIPTFWENAENFVKMGDKIGGVTMGLWRAEHLNKPNLERIFNIAKKAIVGSSVVTTQCGKLIGKAATFIADKVGGGVVRNITDSIKGLCGITRGHFERKMSPQFLKTLMFFLFYFLKASVKSVVASYKTVLCKVVLATLLIVWFVYTSNPVMFTGIRVLDFLFEGSLCGPYKDYGKDSFDVLRYCADDFICRVCLHDKDSLHLYKHAYSVEQVYKDAASGFIFNWNWLYLVFLILFVKPVAGFVIICYCVKYLVLNSTVLQTGVCFLDWFVQTVFSHFNFMGAGFYFWLFYKIYIQVHHILYCKDVTCEVCKRVARSNRQEVSVVVGGRKQIVHVYTNSGYNFCKRHNWYCRNCDDYGHQNTFMSPEVAGELSEKLKRHVKPTAYAYHVVDEACLVDDFVNLKYKAATPGKDSASSAVKCFSVTDFLKKAVFLKEALKCEQISNDGFIVCNTQSAHALEEAKNAAIYYAQYLCKPILILDQALYEQLVVEPVSKSVIDKVCSILSSIISVDTAALNYKAGTLRDALLSITKDEEAVDMAIFCHNHDVDYTGDGFTNVIPSYGIDTGKLTPRDRGFLINADASIANLRVKNAPPVVWKFSELIKLSDSCLKYLISATVKSGVRFFITKSGAKQVIACHTQKLLVEKKAGGIVSGTFKCFKSYFKWLLIFYILFTACCSGYYYMEVSKSFVHPMYDVNSTLHVEGFKVIDKGVLREIVPEDTCFSNKFVNFDAFWGRPYDNSRNCPIVTAVIDGDGTVATGVPGFVSWVMDGVMFIHMTQTERKPWYIPTWFNREIVGYTQDSIITEGSFYTSIALFSARCLYLTASNTPQLYCFNGDNDAPGALPFGSIIPHRVYFQPNGVRLIVPQQILHTPYVVKFVSDSYCRGSVCEYTRPGYCVSLNPQWVLFNDEYTSKPGVFCGSTVRELMFSMVSTFFTGVNPNIYMQLATMFLILVVVVLIFAMVIKFQGVFKAYATTVFITMLVWVINAFILCVHSYNSVLAVILLVLYCYASLVTSRNTVIIMHCWLVFTFGLIVPTWLACCYLGFIIYMYTPLFLWCYGTTKNTRKLYDGNEFVGNYDLAAKSTFVIRGSEFVKLTNEIGDKFEAYLSAYARLKYYSGTGSEQDYLQACRAWLAYALDQYRNSGVEIVYTPPRYSIGVSRLQSGFKKLVSPSSAVEKCIVSVSYRGNNLNGLWLGDTIYCPRHVLGKFSGDQWNDVLNLANNHEFEVTTQHGVTLNVVSRRLKGAVLILQTAVANAETPKYKFIKANCGDSFTIACAYGGTVVGLYPVTMRSNGTIRASFLAGACGSVGFNIEKGVVNFFYMHHLELPNALHTGTDLMGEFYGGYVDEEVAQRVPPDNLVTNNIVAWLYAAIISVKESSFSLPKWLESTTVSVDDYNKWAGDNGFTPFSTSTAITKLSAITGVDVCKLLRTIMVKNSQWGGDPILGQYNFEDELTPESVFNQIGGVRLQSSFVRKATSWFWSRCVLACFLFVLCAIVLFTAVPLKFYVYAAVILLMAVLFISFTVKHVMAYMDTFLLPTLITVIIGVCAEVPFIYNTLISQVVIFLSQWYDPVVFDTMVPWMFLPLVLYTAFKCVQGCYMNSFNTSLLMLYQFVKLGFVIYTSSNTLTAYTEGNWELFFELVHTTVLANVSSNSLIGLFVFKCAKWMLYYCNATYLNNYVLMAVMVNCIGWLCTCYFGLYWWVNKVFGLTLGKYNFKVSVDQYRYMCLHKINPPKTVWEVFSTNILIQGIGGDRVLPIATVQAKLSDVKCTTVVLMQLLTKLNVEANSKMHVYLVELHNKILASDDVGECMDNLLGMLITLFCIDSTIDLSEYCDDILKRSTVLQSVTQEFSHIPSYAEYERAKNLYEKVLVDSKNGGVTQQELAAYRKAANIAKSVFDRDLAVQKKLDSMAERAMTTMYKEARVTDRRAKLVSSLHALLFSMLKKIDSEKLNVLFDQASSGVVPLATVPIVCSNKLTLVIPDPETWVKCVEGVHVTYSTVVWNIDTVIDADGTELHPTSTGSGLTYCISGANIAWPLKVNLTRNGHNKVDVVLQNNELMPHGVKTKACVAGVDQAHCSVESKCYYTNISGNSVVAAITSSNPNLKVASFLNEAGNQIYVDLDPPCKFGMKVGVKVEVVYLYFIKNTRSIVRGMVLGAISNVVVLQSKGHETEEVDAVGILSLCSFAVDPADTYCKYVAAGNQPLGNCVKMLTVHNGSGFAITSKPSPTPDQDSYGGASVCLYCRAHIAHPGSVGNLDGRCQFKGSFVQIPTTEKDPVGFCLRNKVCTVCQCWIGYGCQCDSLRQPKSSVQSVAGASDFDKNYLNRVRGSSEARLIPLASGCDPDVVKRAFDVCNKESAGMFQNLKRNCARFQELRDTEDGNLEYLDSYFVVKQTTPSNYEHEKSCYEDLKSEVTADHDFFVFNKNIYNISRQRLTKYTMMDFCYALRHFDPKDCEVLKEILVTYGCIEDYHPKWFEENKDWYDPIENSKYYVMLAKMGPIVRRALLNAIEFGNLMVEKGYVGVITLDNQDLNGKFYDFGDFQKTAPGAGVPVFDTYYSYMMPIIAMTDALAPERYFEYDVHKGYKSYDLLKYDYTEEKQELFQKYFKYWDQEYHPNCRDCSDDRCLIHCANFNILFSTLIPQTSFGNLCRKVFVDGVPFIATCGYHSKELGVIMNQDNTMSFSKMGLSQLMQFVGDPALLVGTSNNLVDLRTSCFSVCALTSGITHQTVKPGHFNKDFYDFAEKAGMFKEGSSIPLKHFFYPQTGNAAINDYDYYRYNRPTMFDICQLLFCLEVTSKYFECYEGGCIPASQVVVNNLDKSAGYPFNKFGKARLYYEMSLEEQDQLFEITKKNVLPTITQMNLKYAISAKNRARTVAGVSILSTMTNRQFHQKILKSIVNTRNASVVIGTTKFYGGWDNMLRNLIQGVEDPILMGWDYPKCDRAMPNLLRIAASLVLARKHTNCCSWSERIYRLYNECAQVLSETVLATGGIYVKPGGTSSGDATTAYANSVFNIIQATSANVARLLSVITRDIVYDNIKSLQYELYQQVYRRVNFDPAFVEKFYSYLCKNFSLMILSDDGVVCYNNTLAKQGLVADISGFREVLYYQNNVFMADSKCWVEPDLEKGPHEFCSQHTMLVEVDGEPKYLPYPDPSRILGACVFVDDVDKTEPVAVMERYIALAIDAYPLVHHENEEYKKVFFVLLAYIRKLYQELSQNMLMDYSFVMDIDKGSKFWEQEFYENMYRAPTTLQSCGVCVVCNSQTILRCGNCIRKPFLCCKCCYDHVMHTDHKNVLSINPYICSQLGCGEADVTKLYLGGMSYFCGNHKPKLSIPLVSNGTVFGIYRANCAGSENVDDFNQLATTNWSIVEPYILANRCSDSLRRFAAETVKATEELHKQQFASAEVREVFSDRELILSWEPGKTRPPLNRNYVFTGYHFTRTSKVQLGDFTFEKGEGKDVVYYKATSTAKLSVGDIFVLTSHNVVSLVAPTLCPQQTFSRFVNLRPNVMVPECFVNNIPLYHLVGKQKRTTVQGPPGSGKSHFAIGLAVYFSSARVVFTACSHAAVDALCEKAFKFLKVDDCTRIVPQRTTVDCFSKFKANDTGKKYIFSTINALPEVSCDILLVDEVSMLTNYELSFINGKINYQYVVYVGDPAQLPAPRTLLNGSLSPKDYNVVTNLMVCVKPDIFLAKCYRCPKEIVDTVSTLVYDGKFIANNPESRECFKVIVNNGNSDVGHESGSAYNTTQLEFVKDFVCRNKQWREAIFISPYNAMNQRAYRMLGLNVQTVDSSQGSEYDYVIFCVTADSQHALNINRFNVALTRAKRGILVVMRQRDELYSALKFTELDSETSLQGTGLFKICNKEFSGVHPAYAVTTKALAATYKVNDELAALVNVEAGSEITYKHLISLLGFKMSVNVEGCHNMFITRDEAIRNVRGWVGFDVEATHACGTNIGTNLPFQVGFSTGADFVVTPEGLVDTSIGNNFEPVNSKAPPGEQFNHLRVLFKSAKPWHVIRPRIVQMLADNLCNVSDCVVFVTWCHGLELTTLRYFVKIGKEQVCSCGSRATTFNSHTQAYACWKHCLGFDFVYNPLLVDIQQWGYSGNLQFNHDLHCNVHGHAHVASVDAIMTRCLAINNAFCQDVNWDLTYPHIANEDEVNSSCRYLQRMYLNACVDALKVNVVYDIGNPKGIKCVRRGDVNFRFYDKNPIVRNVKQFEYDYNQHKDKFADGLCMFWNCNVDCYPDNSLVCRYDTRNLSVFNLPGCNGGSLYVNKHAFYTPKFDRISFRNLKAMPFFFYDSSPCETIQVDGVAQDLVSLATKDCITKCNIGGAVCKKHAQMYAEFVTSYNAAVTAGFTFWVTNKLNPYNLWKSFSALQSIDNIAYNMYKGGHYDAIAGEMPTVITGDKVFVIDQGVEKAVFVNQTTLPTSVAFELYAKRNIRTLPNNRILKGLGVDVTNGFVIWDYANQTPLYRNTVKVCAYTDIEPNGLVVLYDDRYGDYQSFLAADNAVLVSTQCYKRYSYVEIPSNLLVQNGMPLKDGANLYVYKRVNGAFVTLPNTINTQGRSYETFEPRSDIERDFLAMSEESFVERYGKDLGLQHILYGEVDKPQLGGLHTVIGMYRLLRANKLNAKSVTNSDSDVMQNYFVLSDNGSYKQVCTVVDLLLDDFLELLRNILKEYGTNKSKVVTVSIDYHSINFMTWFEDGSIKTCYPQLQSAWTCGYNMPELYKVQNCVMEPCNIPNYGVGITLPSGILMNVAKYTQLCQYLSKTTICVPHNMRVMHFGAGSDKGVAPGSTVLKQWLPEGTLLVDNDIVDYVSDAHVSVLSDCNKYNTEHKFDLVISDMYTDNDSKRKHEGVIANNGNDDVFIYLSSFLRNNLALGGSFAVKVTETSWHEVLYDIAQDCAWWTMFCTAVNASSSEAFLIGVNYLGASEKVKVSGKTLHANYIFWRNCNYLQTSAYSIFDVAKFDLRLKATPVVNLKTEQKTDLVFNLIKCGKLLVRDVGNTSFTSDSFVCTM

SEQ ID NO: 9906 - protein, 409 aa, Avian infectious bronchitis virus
MASGKAAGKSDSPAPIIKLGGPKPPKVGSSGNASWFQAIKAKKLNAPAPKFEGSGVPDNENLKNSQQHGYWRRQARFKPGKGGRKPVPDAWYFYYTGTGPAADLNWGDSQDGIVWVAAKGADVKSRSNQGTRDPDKFDQYPLRFSDGGPDGNFRWDFIPLSRGRSGRSTAASSAASSRVPSREGSRGRRSGAEDDLIARAAKIIQDQQRKGTRITKQKAEEMAHRRFCKRTVPPGYRVDQVFGPRTKGKEGNFGDDKMNEEGIKDGRVTAMLNLTPSPHACLFGSRVTPKLQPDGLHLRFEFTTVVPRDDPQFDNYVKICDECVDGVGTRPKDEVVRPKSRPNSRPATRTSSPAPRQQRQKKEKKSKKQDDEVDKALTSDEERNNAQLEFDDEPKVINWGDSALGENEL

SEQ ID NO: 9907 - protein, 108 aa, Avian infectious bronchitis virus; identical to SEQ ID NO: 6073

SEQ ID NO: 9908 - protein, 200 aa, Avian infectious bronchitis virus
MSNAANCTLDCEQSVELFKEYNLFITAFLLFLTILLQYGYATRSRFIYIMKMIVLWCFWPLNIAVGVISCIYPPNTGGLVAAKILTVVACLSFEGYWIQSIRLFKRGGQWWAFNPESNAVGSILLSNGQQCNFAIESVPMVLSPIIKNGVLYCEGQWLAKCEPDHLPKDIFVCPPDRRNIYRMVQKYTGDQSGNKKRFAT

SEQ ID NO: 9909 - protein, 1162 aa, Avian infectious bronchitis virus; identical to SEQ ID NO: 6072

SEQ ID NO: 9910 - DNA, 371 bp, Avian infectious bronchitis virus
tattaaaatcttattgttgctggtatcactgcttgttttgccgtgtctcactttatacatctgttgcttgggctacctagtgtccagcgtcctacgggcgtcgtggctggttcgagtgcgaggaacctctggttcatctagcggtaggcgggtgtgtggaagtagcacttcagacgtaccggttctgttgtgtgaaatacggggtcacctccccccacatacctctaagggcttttgagcctagcgttgggctacgttctcgcataaggtcggctatacgacgtttgtagggggtagtgccaaacaacccctgaggtgacaggttctggtggtgtttagtgagcagacatacaatagacagtgacaacatg

SEQ ID NO: 9911 - DNA, 506 bp, Avian infectious bronchitis virus
gtaacataatggacctgttgtttcctggtacattttgttaaacactatttctgtgctttcctatcaattattacaggcattgattgtgattatgttcaatacttaagcttcttttggttgctttttgcttattgtattgttgctgtgctttttattgttgtgattctcattagtttgctttatcgtagaaattcaatagtaagagttaaggaagataggcatgtagcttgattacctacatgtctatcgccagggaaatgtctaatctgtctacttagtagcctggaaacgaacggtagacccttagattttaatttagtttaatttttagtttagtttaagttagtttagagtaggtataaagatgccagtgccggggccacgcggagtacgatcgagggtacagcactaggacgcccattaggggaagagctaaattttagtttaagttaagtttaattggctaagtatagttaaaatttataggctagtatagagttagagca

SEQ ID NO: 9912 - DNA, 737 bp, Human coronavirus OC43
gatgtggatgacgtttaggtaatccaaacattatgagtagtaaaactactccagcaccagtttatatctggactgctgatgaagctattaaattcctaaaggaatggaatttttctttgggtattatactactttttattacaatcatattgcaatttggatatacaagtcgcagtatgtttgtttatgttattaagatgattattttgtggcttatgtggccccttactataatcttaactattttcaattgcgtatacgcattgaataatgtgtatcttggcctttctatagtttttaccatagtggccattattatgtggattgtgtattttgtgaatagtatcaggttgtttattagaactggaagtttttggagtttcaacccagaaacaaacaacttgatgtgtatagatatgaaaggaacaatgtatgttaggccgataattgaggactatcatactctgacggtcacaataatacgcggccatctttacattcaaggtataaaactaggtactggctattcttgggcagatttgccagcttatatgactgttgctaaggttacacacctgtgcacatataagcgtggttttcttgacaggataagcgatactagtggttttgctgtttatgttaagtccaaagtcggtaattaccgactgccatcaacccaaaagggttctggcatggacaccgcattgttgagaaataatatctaaattttaaggatg

SEQ ID NO: 9913 - DNA, 1304 bp, Human coronavirus OC43
ctaaactcagtgaaaatgtttttgcttcctagatttattctagttagctgcataattggtagcttaggtttttacaaccctcctaccaatgttgtttcgcatgtaaatggagattggtttttatttggtgacagtcgttcagattgtaatcatattgttaatatcaacccccataattattcttatatggaccttaatcctgttctgtgtgattctggtaaaatatcatctaaagctggcaactccatttttaggagttttcactttaccgatttttataattacacaggcgaaggtcaacaaattattttttatgagggtgttaattttacgccttatcatgcctttaaatgcaaccgttctggtagtaatgatatttggatgcagaataaaggcttgttttatactcaggtttataagaatatggctgtgtatcgcagccttacttttgttaatgtaccatatgtttataatggctctgcacaatctacagctctttgtaaatctggtagtttagtccttaataaccctgcatatatagctcctcaagctaactctggggattattattataaggttgaagctgatttttatttgtcaggttgtgacgagtatatcgtaccactttgtatttttaacggcaagtttttgtcgaatacaaagtattatgatgatagtcaatattattttaataaagacactggtgttatttatggtctcaattctacagaaaccattaccactggttttgatcttaattgttattatttagttttaccctctggtaattatttagccatttcaaatgagctattgttaactgttcctacgaaagcaatctgtcttaataagcgtaaggattttacgcctgtacaggttgttgattcgcggtggaacaatgccaggcagtctgataacatgacggcggttgcttgtcaacctccgtactgttattttcgtaattctactaccaactatgttggtgtttatgatattaatcatggagatgctggttttactagcatacttagtggtttgttatataattcaccttgtttttcgcagcaaggcgtttttaggtatgataatgttagcagtgtctggcctctctacccctatggcagatgtcccactgctgctgatattaataaccctgatttacccatttgtgtgtatgatccgctaccagttattttgcttggcattcttttgggcgttgcggtcataattattgtagttttgttgttatattttatggtggataatggtactaggctgcatgatgcttagaccataatctaaac

SEQ ID NO: 9914 - protein, 6758 aa, Human coronavirus OC43
MACNRVTLAVASDSEISANGCSTIAQAVRRYSEAASNGFRACRFVSLDLQDCIVGIADDTYVMGLHGNQTLFCNIMKFSDRPFMLHGWLVFSNSNYLLEEFDVVFGKRGGGNVTYTDQYLCGADGKPVMSEDLWQFVDHFGENEEIIINGHTYVCAWLTKRKPLDYKRQNNLAIEEIEYVHGDALHTLRNGSVLEMAKEVKTSSKVVLSDALDKLYKVFGSPVMTNGSNILEAFTKPVFISALVQCTCGTKSWSVGDWTGFKSSCCNVISNKLCVVPGNVKPGDAVITTQQAGAGIKYFCGMTLKFVANIEGVSVWRVIALQSVDCFVASSTFVEEEHVNRMDTFCFNVRNSVTDECRLAMLGAEMTSNVRRQVASGVIDISTGWFDVYDDIFAESKPWFVRKAEDIFGPCWSALASALKQLKVTTGELVRFVKSICNSAVAVVGGTIQILASVPEKFLNAFDVFVTAIQTVFDCAVETCTIAGKAFDKVFDYVLLDNALVKLVTTKLKGVRERGLNKVKYATVVVGSTEEVKSSRVERSTAVLTIANNYSKLFDEGYTVVIGDVAYFVSDGYFRLMASPNSVLTTAVYKPLFAFNVNVMGTRPEKFPTTVTCENLESAVLFVNDKITEFQLDYSIDVIDNEIIVKPNISLCVPLYVRDYVDKWDDFCRQYSNESWFEDDYRAFISVLDITDAAVKAAESKAFVDTIVPPCPSILKVIDGGKIWNGVIKNVNSVRDWLKSLKLNLTQQGLLGTCAKRFKRWLGILLEAYNAFLDTVVSTVKIGGLTFKTYAFDKPYIVIRDIVCKVENKTEAEWIELFPHNDRIKSFSTFESAYMPIADPTHFDIEEVELLDAEFVEPGCGGILAVIDEHVFYKKDGVYYPSNGTNILPVAFTKAAGGKVSFSDDVEVKDIEPVYRVKLCFEFEDEKLVDVCEKAIGKKIKHEGDWDSFCKTIQSALSVVSCYVNLPTYYIYDEEGGNDLSLPVMISEWPLSVQQAQQEATLPDIAEDVVDQVEEVNSIFDIETVDVKHDVSPFEMPFEELNGLKILKQLDNNCWVNSVMLQIQLTGILDGDYAMQFFKMGRVAKMIERCYTAEQCIRGAMGDVGLCMYRLLKDLHTGFMVMDYKCSCTSGRLEESGAVLFCTPTKKAFPYGTCLNCNAPRMCTIRQLQGTIIFVQQKPEPVNPVSFVVKPVCSSIFRGAVSCGHYQTNIYSQNLCVDGFGVNKIQPWTNDALNTICIKDADYNAKVEISVTPIKNTVDTTPKEEFVVKEKLNAFLVHDNVAFYQGDVDTVVNGVDFDFIVNAANENLAHGGGLAKALDVYTKGKLQRLSKEHIGLAGKVKVGTGVMVECDSLRIFNVVGPRKGKHERDLLIKAYNTINNEQGTPLTPILSCGIFGIKLETSLEVLLDVCNTKEVKVFVYTDTEVCKVKDFVSGLVNVQKVEQPKIEPKPVSVIKVAPKPYRVDGKFSYFTEDLLCVADDKPIVLFTDSMLTLDDRGLALDNALSGVLSAAIKDCVDINKAIPSGNLIKFDIGSVVVYMCVVPSEKDKHLDNNVQRCTRKLNRLMCDIVCTIPADYILPLVLSSLTCNVSFVGELKAAEAKVITIKVTEDGVNVHDVTVTTDKSFEQQVGVIADKDKDLSGAVPSDLNTSELLTKAIDVDWVEFYGFKDAVTFATVDHSAFAYESAVVNGIRVLKTSDNNCWVNAVCIALQYSKPHFISQGLDAAWNKFVLGDVEIFVAFVYYVARLMKGDKGDAEDTLTKLSKYLANEAQVQLEHYSSCVECDAKFKNSVASINSAIVCASVKRDGVQVGYCVHGIKYYSRVRSVRGRAIIVSVEQLEPCAQSRLLSGVAYTAFSGPVDKGHYTVYDTAKKSMYDGDRFVKHDLSLLSVTSVVMVGGYVAPVNTVKPKPVINQLDEKAQKFFDFGDFLIHNFVIFFTWLLSMFTLCKTAVTTGDVKIMAKAPQRTGVVLKRSLKYNLKASAAVLKSKWWLLAKFTKLLLLIYTLYSVVLLCVRFGPFNFCSETVNGYAKSNFVKDDYCDGSLGCKMCLFGYQELSQFSHLDVVWKHITDPLFSNMQPFIVMVLLLIFGDNYLRCFLLYFVAQMISTVGVFLGYKETNWFLHFIPFDVICDELLVTVIVIKVISFVRHVLFGCENPDCIACSKSARLKRFPVNTIVNGVQRSFYVNANGGSKFCKKHRFFCVDCDSYGYGSTFITPEVSRELGNITKTNVQPTGPAYVMIDKVEFENGFYRLYSCETFWRYNFDITESKYSCKEVFKNCNVLDDFIVFNNNGTNVTQVKNASVYFSQLLCRPIKLVDSELLSTLSVDFNGVLHKAYIDVLRNSFGKDLNANMSLAECKRALGLSISDHEFTSAISNAHRCDVLLSDLSFNNFVSSYAKPEEKLSAYDLACCMRAGAKVVNANVLTKDQTPIVWHAKDFNSLSAEGRKYIVKTSKAKGLTFLLTINENQAVTQIPATSIVAKQGAGDAGHSLTWLWLLCGLVCLIQFYLCFFMPYFMYDIVSSFEGYDFKYIENGQLKNFEAPLKCVRNVFENFEDWHYAKFGFTPLNKQSCPIVVGVSEIVNTVAGIPSNVYLVGKTLIFTLQAAFGNAGVCYDIFGVTTPEKCIFTSACTRLEGLGGNNVYCYNTALMEGSLPYSSIQANAYYKYDNGNFIKLPEVIAQGFGFRTVRTIATKYCRVGECVESNAGVCFGFDKWFVNDGRVANGYVCGTGLWNLVFNILSMFSSSFSVAAMSGQILLNCALGAFAIFCCFLVTKFRRMFGDLSVGVCTVVVAVLLNNVSYIVTQNLVTMIAYAILYFFATRSLRYAWIWCAAYLIAYISFAPWWLCAWYFLAMLTGLLPSLLKLKVSTNLFEGDKFVGTFESAAAGTFVIDMRSYEKLANSISPEKLKSYAASYNRYKYYSGNANEADYRCACYAYLAKAMLDFSRDHNDILYTPPTVSYGSTLQAGLRKMAQPSGFVEKCVVRVCYGNTVLNGLWLGDIVYCPRHVIASNTTSAIDYDHEYSIMRLHNFSIISGTAFLGVVGATMHGVTLKIKVSQTNMHTPRHSFRTLKSGEGFNILACYDGCAQGVFGVNMRTNWTIRGSFINGACGSPGYNLKNGEVEFVYMHQIELGSGSHVGSSFDGVMYGGFEDQPNLQVESANQMLTVNVVAFLYAAILNGCTWWLKGEKLFVEHYNEWAQANGFTAMNGEDAFSILAAKTGVCVERLLHAIQVLNNGFGGKQILGYSSLNDEFSINEVVKQMFGVNLQSGKTTSMFKSISLFAGFFVMFWAELFVYTTTIWVNPGFLTPFMILLVALSLCLTFVVKHKVLFLQVFLLPSIIVAAIQNCAWDYHVTKVLAEKFDYNVSVMQMDIQGFVNIFICLFVALLHTWRFAKERCTHWCTYLFSLIAVLYTALYSYDYVSLLVMLLCAISNEWYIGAIIFRICRFGVAFLPVEYVSYFDGVKTVLLFYMLLGFVSCMYYGLLYWINRFCKCTLGVYDFCVSPAEFKYMVANGLNAPNGPFDALFLSFKLMGIGGPRTIKVSTVQSKLTDLKCTNVVLMGILSNMNIASNSKEWAYCVEMHNKINLCDDPETAQELLLALLAFFLSKHSDFGLGDLVDSYFENDSILQSVASSFVGMPSFVAYETARQEYENAVANGSSPQIIKQLKKAMNVAKAEFDRESSVQKKINRMAEQAAAAMYKEARAVNRKSKVVSAMHSLLFGMLRRLDMSSVDTILNMARNGVVPLSVIPATSAARLVVVVPDHDSFVKMMVDGFVHYAGVVWTLQEVKDNDGKNVHLKDVTKENQEILVWPLILTCERVVKLQNNEIMPGKMKVKATKGEGDGGITSEGNALYNNEGGRAFMYAYVTTKPGMKYVKWEHDSGVVTVELEPPCRFVIDTPTGPQIKYLYFVKNLNNLRRGAVLGYIGATVRLQAGKQTEFVSNSHLLTHCSFAVDPAAAYLDAVKQGAKPVGNCVKMLTNGSGSGQAITCTIDSNTTQDTYGGASVCIYCRAHVAHPTMDGFCQYKGKWVQVPIGTNDPIRFCLENTVCKVCGCWLNHGCTCDRTAIQSFDNSYLNRVRGSSAARLEPCNGTDIDYCVRAFDVYNKDASFIGKNLKSNCVRFKNVDKDDAFYIVKRCIKSVMDHEQSMYNLLKGCNAVAKHDFFTWHEGRTIYGNVSRQDLTKYTMMDLCFALRNFDEKDCEVFKEILVLTGCCSTDYFEMKNWFDPIENEDIHRVYAALGKVVANAMLKCVAFCDEMVLKGVVGVLTLDNQDLNGNFYDFGDFVLCPPGMGIPYCTSYYSYMMPVMGMTNCLASECFMKSDIFGQDFKTFDLLKYDFTEHKEVLFNKYFKYWGQDYHPDCVDCHDEMCILHCSNFNTLFATTIPNTAFGPLCRKVFIDGVPVVATAGYHFKQLGLVWNKDVNTHSTRLTITELLQFVTDPTLIVASSPALVDKRTVCFSVAALSTGLTSQTVKPGHFNKEFYDFLRSQGFFDEGSELTLKHFFFTQKGDAAIKDFDYYRYNRPTMLDIGQARVAYQVAARYFDCYEGGCITSREVVVTNLNKSAGWPLNKFGKAGLYYESISYEEQDAIFSLTKRNILPTMTQLNLKYAISGKERARTVGGVSLLATMTTRQFHQKCLKSIVATRNATVVIGTTKFYGGWDNMLKNLMADVDDPKLMGWDYPKCDRAMPSMIRMLSAMILGSKHVTCCTASDKFYRLSNELAQVLTEVVYSNGGFYFKPGGTTSGDATTAYANSVFNIFQAVSSNINCVLSVNSSNCNNFNVKKLQRQLYDNCYRNSNVDESFVDDFYGYLQKHFSMMILSDDSVVCYNKTYAGLGYIADISAFKATLYYQNGVFMSTAKCWTEEDLSIGPHEFCSQHTMQIVDENGKYYLPYPDPSRIISAGVFVDDITKTDAVILLERYVSLAIDAYPLSKHPKPEYRKVFYALLDWVKHLNKTLNEGVLESFSVTLLDEHESKFWDESFYASMYEKSTVLQAAGLCVVCGSQTVLRCGDCLRRPMLCTKCAYDHVFGTDHKFILAITPYVCNTSGCNVNDVTKLYLGGLNYYCVDHKPHLSFPLCSAGNVFGLYKSSALGSMDIDVFNKLSTSDWSDIRDYKLANDAKESLRLFAAETVKAKEESVKSSYAYATLKEIVGPKELLLLWESGKAKPPLNRNSVFTCFQITKDSKFQVGEFVFEKVDYGSDTVTYKSTATTKLVPGMLFILTSHNVAPLRAPTMANQEKYSTIYKLHPSFNVSDAYANLVPYYQLIGKQRITTIQGPPGSGKSHCSIGIGVYYPGARIVFTACSHAAVDSLCAKAVTAYSVDKCTRIIPARARVECYSGFKPNNNSAQYVFSTVNALPEVNADIVVVDEVSMCTNYDLSVINQRISYKHIVYVGDPQQLPAPRVLISKGVMEPIDYNVVTQRMCAIGPDVFLHKCYRCPAEIVNTVSELVYENKFVPVKEASKQCFKIFERGSVQVDNGSSINRRQLDVVKRFIHKNSTWSKAVFISPYNSQNYVAARLLGLQTQTVDSAQGSEYDYVIFAQTSDTAHACNANRFNVAITRAKKGIFCIMSDRTLFDALKFFEITMTDLQSESSCGLFKDCARNPIDLPPSHATTYLSLSDRFKTSGDLAVQIGNNNVCTYEHVISYMGFRFDVSMPGSHSLFCTRDFAMRHVRGWLGMDVEGAHVTGDNVGTNVPLQVGFSNGVDFVAQPEGCVLTNTGSVVKPVRARAPPGEQFTHIVPLLRKGQPWSVLRKRIVQMIADFLAGSSDVLVFVLWAGGLELTTMRYFVKIGAVKHCQCGTVATCYNSVSNDYCCFKHALGCDYVYNPYVIDIQQWGYVGSLSTNHHAICNVHRNEHVASGDAIMTRCLAVYDCFVKNVDWSITYPMIANENAINKGGRTVQSHIMRAAIKLYNPKAIHDIGNPKGIRCAVTDAKWYCYDKNPINSNVKTLEYDYMTHGQMDGLCLFWNCNVDMYPEFSIVCRFDTRTRSTLNLEGVNGGSLYVNNHAFHTPAYDKRAMAKLKPAPFFYYDDGSCEVVHDQVNYVPLRATNCITKCNIGGAVCSKHANLYRAYVESYNIFTQAGFNIWVPTTFDCYNLWQTFTEVNLQGLENIAFNVVNKGSFVGADGELPVAISGDKVFVRDGNTDNLVFVNKTSLPTNIAFELFAKRKVGLTPPLSILKNLGVVATYKFVLWDYEAERPLTSFTKSVCGYTDFAEDVCTCYDNSIQGSYERFTLSTNAVLFSATAVKTGGKSLPAIKLNFGMLNGNAIATVKSEDGNIKNINWFVYVRKDGKPVDHYDGFYTQGRNLQDFLPRSTMEEDFLNMDIGVFIQKYGLEDFNFEHVVYGDVSKTTLGGLHLLISQVRLSKMGILKAEEFVAASDITLKCCTVTYLNDPSSKTVCTYMDLLLDDFVSVLKSLDLTVVSKVHEVIIDNKPWRWMLWCKDNAVATFYPQLQSAEWKCGYSMPGIYKTQRMCLEPCNLYNYGAGLKLPSGIMFNVVKYTQLCQYFNSTTLCVPHNMRVLHLGAGSDYGVAPGTAVLKRWLPHDAIVVDNDVVDYVSDADFSVTGDCATVYLEDKFDLLISDMYDGRTKAIDGENVSKEGFFTYINGFICEKLAIGGSIAIKVTEYSWNKKLYELVQRFSFWTMFCTSVNTSSSEAFVVGINYLGDFAQGPFIDGNIIHANYVFWRNSTVMSLSYNSVLDLSKFNCKHKATVVVQLKDSDINEMVLSLVRSGKLLVRGNGKCLSFSNHLVSTK

SEQ ID NO: 9915 - protein, 448 aa, Human coronavirus OC43
MSFTPGKQSSSRASSGNRSGNGILKWADQSDQVRNVQTRGRRAQPKQTATSQQPSGGNVVPYYSWFSGITQFQKGKEFEFVEGQGPPIAPGVPATEAKGYWYRHNRGSFKTADGNQRQLLPRWYFYYLGTGPHAKDQYGTDIDGVYWVASNQADVNTPADIVDRDPSSDEAIPTRFPPGTVLPQGYYIEGSGRSAPNSRSTSRTSSRASSAGSRSRANSGNRTPTSGVTPDMADQIASLVLAKLGKDATKPQQVTKHTAKEVRQKILNKPRQKRSPNKQCTVQQCFGKRGPNQNFGGGEMLKLGTSDPQFPILAELAPTAGAFFFGSRLELAKVQNLSGNPDEPQKDVYELRYNGAIRFDSTLSGFETIMKVLNENLNAYQQQDGMMNMSPKPQRQRGHKNGQGENDNISVAVPKSRVQQNKSRELTAEDISLLKKMDEPYTEDTSEI

SEQ ID NO: 9916 - protein, 424 aa, Human coronavirus OC43
MFLLPRFILVSCIIGSLGFYNPPTNVVSHVNGDWFLFGDSRSDCNHIVNINPHNYSYMDLNPVLCDSGKISSKAGNSIFRSFHFTDFYNYTGEGQQIIFYEGVNFTPYHAFKCNRSGSNDIWMQNKGLFYTQVYKNMAVYRSLTFVNVPYVYNGSAQSTALCKSGSLVLNNPAYIAPQANSGDYYYKVEADFYLSGCDEYIVPLCIFNGKFLSNTKYYDDSQYYFNKDTGVIYGLNSTETITTGFDLNCYYLVLPSGNYLAISNELLLTVPTKAICLNKRKDFTPVQVVDSRWNNARQSDNMTAVACQPPYCYFRNSTTNYVGVYDINHGDAGFTSILSGLLYNSPCFSQQGVFRYDNVSSVWPLYPYGRCPTAADINNPDLPICVYDPLPVILLGILLGVAVIIIVVLLLYFMVDNGTRLHDA

SEQ ID NO: 9917 - protein, 230 aa, Human coronavirus OC43
MSSKTTPAPVYIWTADEAIKFLKEWNFSLGIILLFITIILQFGYTSRSMFVYVIKMIILWLMWPLTIILTIFNCVYALNNVYLGLSIVFTIVAIIMWIVYFVNSIRLFIRTGSFWSFNPETNNLMCIDMKGTMYVRPIIEDYHTLTVTIIRGHLYIQGIKLGTGYSWADLPAYMTVAKVTHLCTYKRGFLDRISDTSGFAVYVKSKVGNYRLPSTQKGSGMDTALLRNNI

SEQ ID NO: 9918 - protein, 1353 aa, Human coronavirus OC43
MFLILLISLPTAFAVIGDLKCTSDNINDKDTGPPPISTDTVDVTNGLGTYYVLDRVYLNTTLFLNGYYPTSGSTYRNMALKGSVLLSRLWFKPPFLSDFINGIFAKVKNTKVIKDRVMYSEFPAITIGSTFVNTSYSVVVQPRTINSTQDGDNKLQGLLEVSVCQYNMCEYPQTICHPNLGNHRKELWHLDTGVVSCLYKRNFTYDVNADYLYFHFYQEGGTFYAYFTDTGVVTKFLFNVYLGMALSHYYVMPLTCNSKLTLEYWVTPLTSRQYLLAFNQDGIIFNAEDCMSDFMSEIKCKTQSIAPPTGVYELNGYTVQPIADVYRRKPNLPNCNIEAWLNDKSVPSPLNWERKTFSNCNFNMSSLMSFIQADSFTCNNIDAAKIYGMCFSSITIDKFAIPNGRKVDLQLGNLGYLQSFNYRIDTTATSCQLYYNLPAANVSVSRFNPSTWNKRFGFIEDSVFKPRPAGVLTNHDVVYAQHCFKAPKNFCPCKLNGSCVGSGPGKNNGIGTCPAGTNYLTCDNLCTPDPITFTGTYKCPQTKSLVGIGEHCSGLAVKSDYCGGNSCTCRPQAFLGWSADSCLQGDKCNIFANFILHDVNSGLTCSTDLQKANTDIILGVCVNYDLYGILGQGIFVEVNATYYNSWQNLLYDSNGNLYGFRDYIINRTFMIRSCYSGRVSAAFHANSSEPALLFRNIKCNYVFNNSLTRQLQPINYFDSYLGCVVNAYNSTAISVQTCDLTVGSGYCVDYSKNRRSRGAITTGYRFTNFEPFTVNSVNDSLEPVGGLYEIQIPSEFTIGNMVEFIQTSSPKVTIDCAAFVCGDYAACKSQLVEYGSFCDNINAILTEVNELLDTTQLQVANSLMNGVTLSTKLKDGVNFNVDDINFSPVLGCLGSECSKASSRSAIEDLLFDKVKLSDVGFVEAYNNCTGGAEIRDLICVQSYKGIKVLPPLLSENQISGYTLAATSASLFPPWTAAAGVPFYLNVQYRINGLGVTMDVLSQNQKLIANAFNNALYAIQEGFDATNSALVKIQAVVNANAEALNNLLQQLSNRFGAISASLQEILSRLDALEAEAQIDRLINGRLTALNAYVSQQLSDSTLVKFSAAQAMEKVNECVKSQSSRINFCGNGNHIISLVQNAPYGLYFIHFSYVPTKYVTARVSPGLCIAGDRGIAPKSGYFVNVNNTWMYTGSGYYYPEPITENNVVVMSTCAVNYTKAPYVMLNTSIPNLPDFKEELDQWFKNQTSVAPDLSLDYINVTFLDLQVEMNRLQEAIKVLNQSYINLKDIGTYEYYVKWPWYVWLLICLAGVAMLVLLFFICCCTGCGTSCFKKCGGCCDDYTGYQELVIKTSHDD

SEQ ID NO: 9919 - DNA, 213 bp, Human coronavirus OC43
gattgtgagcgatttgcgtgcgtgcatcccgcttcactgatctcttgttagatctttttgtaatctaaactttataaaaacatccactccctgtaatctatgcttgtgggcgtagatttttcatagtggtgtttatattcatttctgctgttaacagctttcagccagggacgtgttgtatcctaggcagtggcccgcccataggtcacaatg

SEQ ID NO: 9920 - DNA, 291 bp, Human coronavirus OC43
taagagaatgaaccttatgtcggcatctggtggtaacccctcgcagaaaagtcgagataaggcactctctatcagaatggatgtcttgctgctataatagatagagaaggttatagcagactatagattaattagttgaaagttttgtgttgtaatgtatagtgttggagaaagtgaaagacttgcggaagtaattgccgacaagtgcccaagggaagagccagcatgttaagttaccacccagtaattagtaaatgaatgaagttaattatggccaattggaagaatcac

SEQ ID NO: 9921 - DNA, 8098 bp, Artificial Sequence
  pCMVKm2 vector
gccgcggaatttcgactctaggccattgcatacgttgtatctatatcataatatgtacatttatattggctcatgtccaatatgaccgccatgttgacattgattattgactagttattaatagtaatcaattacggggtcattagttcatagcccatatatggagttccgcgttacataacttacggtaaatggcccgcctggctgaccgcccaacgacccccgcccattgacgtcaataatgacgtatgttcccatagtaacgccaatagggactttccattgacgtcaatgggtggagtatttacggtaaactgcccacttggcagtacatcaagtgtatcatatgccaagtccgccccctattgacgtcaatgacggtaaatggcccgcctggcattatgcccagtacatgaccttacgggactttcctacttggcagtacatctacgtattagtcatcgctattaccatggtgatgcggttttggcagtacaccaatgggcgtggatagcggtttgactcacggggatttccaagtctccaccccattgacgtcaatgggagtttgttttggcaccaaaatcaacgggactttccaaaatgtcgtaataaccccgccccgttgacgcaaatgggcggtaggcgtgtacggtgggaggtctatataagcagagctcgtttagtgaaccgtcagatcgcctggagacgccatccacgctgttttgacctccatagaagacaccgggaccgatccagcctccgcggccgggaacggtgcattggaacgcggattccccgtgccaagagtgacgtaagtaccgcctatagactctataggcacacccctttggctcttatgcatgctatactgtttttggcttggggcctatacacccccgcttccttatgctataggtgatggtatagcttagcctataggtgtgggttattgaccattattgaccactcccctattggtgacgatactttccattactaatccataacatggctctttgccacaactatctctattggctatatgccaatactctgtccttcagagactgacacggactctgtatttttacaggatggggtcccatttattatttacaaattcacatatacaacaacgccgtcccccgtgcccgcagtttttattaaacatagcgtgggatctccacgcgaatctcgggtacgtgttccggacatgggctcttctccggtagcggcggagcttccacatccgagccctggtcccatgcctccagcggctcatggtcgctcggcagctccttgctcctaacagtggaggccagacttaggcacagcacaatgcccaccaccaccagtgtgccgcacaaggccgtggcggtagggtatgtgtctgaaaatgagctcggagattgggctcgcaccgctgacgcagatggaagacttaaggcagcggcagaagaagatgcaggcagctgagttgttgtattctgataagagtcagaggtaactcccgttgcggtgctgttaacggtggagggcagtgtagtctgagcagtactcgttgctgccgcgcgcgccaccagacataatagctgacagactaacagactgttcctttccatgggtcttttctgcagtcaccgtcgtcgacctaagaattcgccaccatgttcatcttcctgctgttcctgactctcactagtggtagtgaccttgaccggtgcaccacttttgatgatgttcaagctcctaattacactcaacatacttcatctatgaggggggtttactatcctgatgaaatttttagatcagacactctttatttaactcaggatttatttcttccattttattctaatgttacagggtttcatactattaatcatacgtttggcaaccctgtcataccttttaaggatggtatttattttgctgccacagagaaatcaaatgttgtccgtggttgggtttttggttctaccatgaacaacaagtcacagtcggtgattattattaacaattctactaatgttgttatacgagcatgtaactttgaattgtgtgacaaccctttctttgctgtttctaaacccatgggtacacagacacatactatgatattcgataatgcatttaattgcactttcgagtacatatctgatgccttttcgcttgatgtttcagaaaagtcaggtaattttaaacacttacgagagtttgtgtttaaaaataaagatgggtttctctatgtttataagggctatcaacctatagatgtagttcgtgatctaccttctggttttaacactttgaaacctatttttaagttgcctcttggtattaacattacaaattttagagccattcttacagccttttcacctgctcaagacatttggggcacgtcagctgcagcctattttgttggctatttaaagccaactacatttatgctcaagtatgatgaaaatggtacaatcacagatgctgttgattgttctcaaaatccacttgctgaactcaaatgctctgttaagagctttgagattgacaaaggaatttaccagacctctaatttcagggttgttccctcaggagatgttgtgagattccctaatattacaaacttgtgtccttttggagaggtttttaatgctactaaattcccttctgtctatgcatgggagagaaaaaaaatttctaattgtgttgctgattactctgtgctctacaactcaacatttttttcaacctttaagtgctatggcgtttctgccactaagttgaatgatctttgcttctccaatgtctatgcagattcttttgtagtcaagggagatgatgtaagacaaatagcgccagggcaaactggtgttattgctgattataattataaattgccagatgatttcatgggttgtgtccttgcttggaatactaggaacattgatgctacttcaactggtaattataattataaatataggtatcttagacatggcaagcttaggccctttgagagagacatatctaatgtgcctttctcccctgatggcaaaccttgcaccccacctgctcttaattgttattggccattaaatgattatggtttttacaccactactggcattggctaccaaccttacagagttgtagtactttcttttgaacttttaaatgcaccggccacggtttgtggaccaaaattatccactgaccttattaagaaccagtgtgtcaattttaattttaatggactcactggtactggtgtgttaactccttcttcaaagagatttcaaccatttcaacaatttggccgtgatgtttctgatttcactgattccgttcgagatcctaaaacatctgaaatattagacatttcaccttgctcttttgggggtgtaagtgtaattacacctggaacaaatgcttcatctgaagttgctgttctatatcaagatgttaactgcactgatgtttctacagcaattcatgcagatcaactcacaccagcttggcgcatatattctactggaaacaatgtattccagactcaagcaggctgtcttataggagctgagcatgtcgacacttcttatgagtgcgacattcctattggagctggcatttgtgctagttaccatacagtttctttattacgtagtactagccaaaaatctattgtggcttatactatgtctttaggtgctgatagttcaattgcttactctaataacaccattgctatacctactaacttttcaattagcattactacagaagtaatgcctgtttctatggctaaaacctccgtagattgtaatatgtacatctgcggagattctactgaatgtgctaatttgcttctccaatatggtagcttttgcacacaactaaatcgtgcactctcaggtattgctgctgaacaggatcgcaacacacgtgaagtgttcgctcaagtcaaacaaatgtacaaaaccccaactttgaaatattttggtggttttaatttttcacaaatattacctgaccctctaaagccaactaagaggtcttttattgaggacttgctctttaataaggtgacactcgctgatgctggcttcatgaagcaatatggcgaatgcctaggtgatattaatgctagagatctcatttgtgcgcagaagttcaatggacttacagtgttgccacctctgctcactgatgatatgattgctgcctacactgctgctctagttagtggtactgccactgctggatggacatttggtgctggcgctgctcttcaaataccttttgctatgcaaatggcatataggttcaatggcattggagttacccaaaatgttctctatgagaaccaaaaacaaatcgccaaccaatttaacaaggcgattagtcaaattcaagaatcacttacaacaacatcaactgcattgggcaagctgcaagacgttgttaaccagaatgctcaagcattaaacacacttgttaaacaacttagctctaattttggtgcaatttcaagtgtgctaaatgatatcctttcgcgacttgataaagtcgaggcggaggtacaaattgacaggttaattacaggcagacttcaaagccttcaaacctatgtaacacaacaactaatcagggctgctgaaatcagggcttctgctaatcttgctgctactaaaatgtctgagtgtgttcttggacaatcaaaaagagttgacttttgtggaaagggctaccaccttatgtccttcccacaagcagccccgcatggtgttgtcttcctacatgtcacgtatgtgccatcccaggagaggaacttcaccacagcgccagcaatttgtcatgaaggcaaagcatacttccctcgtgaaggtgtttttgtgtttaatggcacttcttggtttattacacagaggaacttcttttctccacaaataattactacagacaatacatttgtctcaggaaattgtgatgtcgttattggcatcattaacaacacagtttatgatcctctgcaacctgagcttgactcattcaaagaagagctggacaagtacttcaaaaatcatacatcaccagatgttgattttggcgacatttcaggcattaacgcttctgtcgtcaacattcaaaaagaaattgaccgcctcaatgaggtcgctaaaaatttaaatgaatcactcattgaccttcaagaattgggaaaatatgagcaatatattaaatggccttggtatgtttggctcggcttcattgctggactaattgccatcgtcatggttacaatcttgctttgttgcatgactagttgttgcagttgcctcaagggtgcatgctcttgtggttcttgctgcaagtttgatgaggatgactctgagccagttctcaagggtgtcaaattacattacacagcctaaatctagaaagccatggatatcggatccactacgcgttagagctcgctgatcagcctcgactgtgccttctagttgccagccatctgttgtttgcccctcccccgtgccttccttgaccctggaaggtgccactcccactgtcctttcctaataaaatgaggaaattgcatcgcattgtctgagtaggtgtcattctattctggggggtggggtggggcaggacagcaagggggaggattgggaagacaatagcaggggggtgggcgaagaactccagcatgagatccccgcgctggaggatcatccagccggcgtcccggaaaacgattccgaagcccaacctttcatagaaggcggcggtggaatcgaaatctcgtgatggcaggttgggcgtcgcttggtcggtcatttcgaaccccagagtcccgctcagaagaactcgtcaagaaggcgatagaaggcgatgcgctgcgaatcgggagcggcgataccgtaaagcacgaggaagcggtcagcccattcgccgccaagctcttcagcaatatcacgggtagccaacgctatgtcctgatagcggtccgccacacccagccggccacagtcgatgaatccagaaaagcggccattttccaccatgatattcggcaagcaggcatcgccatgggtcacgacgagatcctcgccgtcgggcatgcgcgccttgagcctggcgaacagttcggctggcgcgagcccctgatgctcttcgtccagatcatcctgatcgacaagaccggcttccatccgagtacgtgctcgctcgatgcgatgtttcgcttggtggtcgaatgggcaggtagccggatcaagcgtatgcagccgccgcattgcatcagccatgatggatactttctcggcaggagcaaggtgagatgacaggagatcctgccccggcacttcgcccaatagcagccagtcccttcccgcttcagtgacaacgtcgagcacagctgcgcaaggaacgcccgtcgtggccagccacgatagccgcgctgcctcgtcctgcagttcattcagggcaccggacaggtcggtcttgacaaaaagaaccgggcgcccctgcgctgacagccggaacacggcggcatcagagcagccgattgtctgttgtgcccagtcatagccgaatagcctctccacccaagcggccggagaacctgcgtgcaatccatcttgttcaatcatgcgaaacgatcctcatcctgtctcttgatcagatcttgatcccctgcgccatcagatccttggcggcaagaaagccatccagtttactttgcagggcttcccaaccttaccagagggcgccccagctggcaattccggttcgcttgctgtccataaaaccgcccagtctagctatcgccatgtaagcccactgcaagctacctgctttctctttgcgcttgcgttttcccttgtccagatagcccagtagctgacattcatccggggtcagcaccgtttctgcggactggctttctacgtgttccgcttcctttagcagcccttgcgccctgagtgcttgcggcagcgtgaagctaattcatggttaaatttttgttaaatcagctcattttttaaccaataggccgaaatcggcaaaatcccttataaatcaaaagaatagcccgagatagggttgagtgttgttccagtttggaacaagagtccactattaaagaacgtggactccaacgtcaaagggcgaaaaaccgtctatcagggcgatggccggatcagcttatgcggtgtgaaataccgcacagatgcgtaaggagaaaataccgcatcaggcgctcttccgcttcctcgctcactgactcgctgcgctcggtcgttcggctgcggcgagcggtatcagctcactcaaaggcggtaatacggttatccacagaatcaggggataacgcaggaaagaacatgtgagcaaaaggccagcaaaaggccaggaaccgtaaaaaggccgcgttgctggcgtttttccataggctccgcccccctgacgagcatcacaaaaatcgacgctcaagtcagaggtggcgaaacccgacaggactataaagataccaggcgtttccccctggaagctccctcgtgcgctctcctgttccgaccctgccgcttaccggatacctgtccgcctttctcccttcgggaagcgtggcgctttctcatagctcacgctgtaggtatctcagttcggtgtaggtcgttcgctccaagctgggctgtgtgcacgaaccccccgttcagcccgaccgctgcgccttatccggtaactatcgtcttgagtccaacccggtaagacacgacttatcgccactggcagcagccactggtaacaggattagcagagcgaggtatgtaggcggtgctacagagttcttgaagtggtggcctaactacggctacactagaaggacagtatttggtatctgcgctctgctgaagccagttaccttcggaaaaagagttggtagctcttgatccggcaaacaaaccaccgctggtagcggtggtttttttgtttgcaagcagcagattacgcgcagaaaaaaaggatctcaagaagatcctttgatcttttctactgaacggtgatccccaccggaattgcg

SEQ ID NO: 9922 - DNA, 7918 bp, Artificial Sequence
  pCMVKm2 vector
gccgcggaatttcgactctaggccattgcatacgttgtatctatatcataatatgtacatttatattggctcatgtccaatatgaccgccatgttgacattgattattgactagttattaatagtaatcaattacggggtcattagttcatagcccatatatggagttccgcgttacataacttacggtaaatggcccgcctggctgaccgcccaacgacccccgcccattgacgtcaataatgacgtatgttcccatagtaacgccaatagggactttccattgacgtcaatgggtggagtatttacggtaaactgcccacttggcagtacatcaagtgtatcatatgccaagtccgccccctattgacgtcaatgacggtaaatggcccgcctggcattatgcccagtacatgaccttacgggactttcctacttggcagtacatctacgtattagtcatcgctattaccatggtgatgcggttttggcagtacaccaatgggcgtggatagcggtttgactcacggggatttccaagtctccaccccattgacgtcaatgggagtttgttttggcaccaaaatcaacgggactttccaaaatgtcgtaataaccccgccccgttgacgcaaatgggcggtaggcgtgtacggtgggaggtctatataagcagagctcgtttagtgaaccgtcagatcgcctggagacgccatccacgctgttttgacctccatagaagacaccgggaccgatccagcctccgcggccgggaacggtgcattggaacgcggattccccgtgccaagagtgacgtaagtaccgcctatagactctataggcacacccctttggctcttatgcatgctatactgtttttggcttggggcctatacacccccgcttccttatgctataggtgatggtatagcttagcctataggtgtgggttattgaccattattgaccactcccctattggtgacgatactttccattactaatccataacatggctctttgccacaactatctctattggctatatgccaatactctgtccttcagagactgacacggactctgtatttttacaggatggggtcccatttattatttacaaattcacatatacaacaacgccgtcccccgtgcccgcagtttttattaaacatagcgtgggatctccacgcgaatctcgggtacgtgttccggacatgggctcttctccggtagcggcggagcttccacatccgagccctggtcccatgcctccagcggctcatggtcgctcggcagctccttgctcctaacagtggaggccagacttaggcacagcacaatgcccaccaccaccagtgtgccgcacaaggccgtggcggtagggtatgtgtctgaaaatgagctcggagattgggctcgcaccgctgacgcagatggaagacttaaggcagcggcagaagaagatgcaggcagctgagttgttgtattctgataagagtcagaggtaactcccgttgcggtgctgttaacggtggagggcagtgtagtctgagcagtactcgttgctgccgcgcgcgccaccagacataatagctgacagactaacagactgttcctttccatgggtcttttctgcagtcaccgtcgtcgacctaagaattcgccaccatgttcatcttcctgctgttcctgactctcactagtggtagtgaccttgaccggtgcaccacttttgatgatgttcaagctcctaattacactcaacatacttcatctatgaggggggtttactatcctgatgaaatttttagatcagacactctttatttaactcaggatttatttcttccattttattctaatgttacagggtttcatactattaatcatacgtttggcaaccctgtcataccttttaaggatggtatttattttgctgccacagagaaatcaaatgttgtccgtggttgggtttttggttctaccatgaacaacaagtcacagtcggtgattattattaacaattctactaatgttgttatacgagcatgtaactttgaattgtgtgacaaccctttctttgctgtttctaaacccatgggtacacagacacatactatgatattcgataatgcatttaattgcactttcgagtacatatctgatgccttttcgcttgatgtttcagaaaagtcaggtaattttaaacacttacgagagtttgtgtttaaaaataaagatgggtttctctatgtttataagggctatcaacctatagatgtagttcgtgatctaccttctggttttaacactttgaaacctatttttaagttgcctcttggtattaacattacaaattttagagccattcttacagccttttcacctgctcaagacatttggggcacgtcagctgcagcctattttgttggctatttaaagccaactacatttatgctcaagtatgatgaaaatggtacaatcacagatgctgttgattgttctcaaaatccacttgctgaactcaaatgctctgttaagagctttgagattgacaaaggaatttaccagacctctaatttcagggttgttccctcaggagatgttgtgagattccctaatattacaaacttgtgtccttttggagaggtttttaatgctactaaattcccttctgtctatgcatgggagagaaaaaaaatttctaattgtgttgctgattactctgtgctctacaactcaacatttttttcaacctttaagtgctatggcgtttctgccactaagttgaatgatctttgcttctccaatgtctatgcagattcttttgtagtcaagggagatgatgtaagacaaatagcgccagggcaaactggtgttattgctgattataattataaattgccagatgatttcatgggttgtgtccttgcttggaatactaggaacattgatgctacttcaactggtaattataattataaatataggtatcttagacatggcaagcttaggccctttgagagagacatatctaatgtgcctttctcccctgatggcaaaccttgcaccccacctgctcttaattgttattggccattaaatgattatggtttttacaccactactggcattggctaccaaccttacagagttgtagtactttcttttgaacttttaaatgcaccggccacggtttgtggaccaaaattatccactgaccttattaagaaccagtgtgtcaattttaattttaatggactcactggtactggtgtgttaactccttcttcaaagagatttcaaccatttcaacaatttggccgtgatgtttctgatttcactgattccgttcgagatcctaaaacatctgaaatattagacatttcaccttgctcttttgggggtgtaagtgtaattacacctggaacaaatgcttcatctgaagttgctgttctatatcaagatgttaactgcactgatgtttctacagcaattcatgcagatcaactcacaccagcttggcgcatatattctactggaaacaatgtattccagactcaagcaggctgtcttataggagctgagcatgtcgacacttcttatgagtgcgacattcctattggagctggcatttgtgctagttaccatacagtttctttattacgtagtactagccaaaaatctattgtggcttatactatgtctttaggtgctgatagttcaattgcttactctaataacaccattgctatacctactaacttttcaattagcattactacagaagtaatgcctgtttctatggctaaaacctccgtagattgtaatatgtacatctgcggagattctactgaatgtgctaatttgcttctccaatatggtagcttttgcacacaactaaatcgtgcactctcaggtattgctgctgaacaggatcgcaacacacgtgaagtgttcgctcaagtcaaacaaatgtacaaaaccccaactttgaaatattttggtggttttaatttttcacaaatattacctgaccctctaaagccaactaagaggtcttttattgaggacttgctctttaataaggtgacactcgctgatgctggcttcatgaagcaatatggcgaatgcctaggtgatattaatgctagagatctcatttgtgcgcagaagttcaatggacttacagtgttgccacctctgctcactgatgatatgattgctgcctacactgctgctctagttagtggtactgccactgctggatggacatttggtgctggcgctgctcttcaaataccttttgctatgcaaatggcatataggttcaatggcattggagttacccaaaatgttctctatgagaaccaaaaacaaatcgccaaccaatttaacaaggcgattagtcaaattcaagaatcacttacaacaacatcaactgcattgggcaagctgcaagacgttgttaaccagaatgctcaagcattaaacacacttgttaaacaacttagctctaattttggtgcaatttcaagtgtgctaaatgatatcctttcgcgacttgataaagtcgaggcggaggtacaaattgacaggttaattacaggcagacttcaaagccttcaaacctatgtaacacaacaactaatcagggctgctgaaatcagggcttctgctaatcttgctgctactaaaatgtctgagtgtgttcttggacaatcaaaaagagttgacttttgtggaaagggctaccaccttatgtccttcccacaagcagccccgcatggtgttgtcttcctacatgtcacgtatgtgccatcccaggagaggaacttcaccacagcgccagcaatttgtcatgaaggcaaagcatacttccctcgtgaaggtgtttttgtgtttaatggcacttcttggtttattacacagaggaacttcttttctccacaaataattactacagacaatacatttgtctcaggaaattgtgatgtcgttattggcatcattaacaacacagtttatgatcctctgcaacctgagcttgactcattcaaagaagagctggacaagtacttcaaaaatcatacatcaccagatgttgattttggcgacatttcaggcattaacgcttctgtcgtcaacattcaaaaagaaattgaccgcctcaatgaggtcgctaaaaatttaaatgaatcactcattgaccttcaagaattgggaaaatatgagcaatatattaaatggcctgcctaaatctagaaagccatggatatcggatccactacgcgttagagctcgctgatcagcctcgactgtgccttctagttgccagccatctgttgtttgcccctcccccgtgccttccttgaccctggaaggtgccactcccactgtcctttcctaataaaatgaggaaattgcatcgcattgtctgagtaggtgtcattctattctggggggtggggtggggcaggacagcaagggggaggattgggaagacaatagcaggggggtgggcgaagaactccagcatgagatccccgcgctggaggatcatccagccggcgtcccggaaaacgattccgaagcccaacctttcatagaaggcggcggtggaatcgaaatctcgtgatggcaggttgggcgtcgcttggtcggtcatttcgaaccccagagtcccgctcagaagaactcgtcaagaaggcgatagaaggcgatgcgctgcgaatcgggagcggcgataccgtaaagcacgaggaagcggtcagcccattcgccgccaagctcttcagcaatatcacgggtagccaacgctatgtcctgatagcggtccgccacacccagccggccacagtcgatgaatccagaaaagcggccattttccaccatgatattcggcaagcaggcatcgccatgggtcacgacgagatcctcgccgtcgggcatgcgcgccttgagcctggcgaacagttcggctggcgcgagcccctgatgctcttcgtccagatcatcctgatcgacaagaccggcttccatccgagtacgtgctcgctcgatgcgatgtttcgcttggtggtcgaatgggcaggtagccggatcaagcgtatgcagccgccgcattgcatcagccatgatggatactttctcggcaggagcaaggtgagatgacaggagatcctgccccggcacttcgcccaatagcagccagtcccttcccgcttcagtgacaacgtcgagcacagctgcgcaaggaacgcccgtcgtggccagccacgatagccgcgctgcctcgtcctgcagttcattcagggcaccggacaggtcggtcttgacaaaaagaaccgggcgcccctgcgctgacagccggaacacggcggcatcagagcagccgattgtctgttgtgcccagtcatagccgaatagcctctccacccaagcggccggagaacctgcgtgcaatccatcttgttcaatcatgcgaaacgatcctcatcctgtctcttgatcagatcttgatcccctgcgccatcagatccttggcggcaagaaagccatccagtttactttgcagggcttcccaaccttaccagagggcgccccagctggcaattccggttcgcttgctgtccataaaaccgcccagtctagctatcgccatgtaagcccactgcaagctacctgctttctctttgcgcttgcgttttcccttgtccagatagcccagtagctgacattcatccggggtcagcaccgtttctgcggactggctttctacgtgttccgcttcctttagcagcccttgcgccctgagtgcttgcggcagcgtgaagctaattcatggttaaatttttgttaaatcagctcattttttaaccaataggccgaaatcggcaaaatcccttataaatcaaaagaatagcccgagatagggttgagtgttgttccagtttggaacaagagtccactattaaagaacgtggactccaacgtcaaagggcgaaaaaccgtctatcagggcgatggccggatcagcttatgcggtgtgaaataccgcacagatgcgtaaggagaaaataccgcatcaggcgctcttccgcttcctcgctcactgactcgctgcgctcggtcgttcggctgcggcgagcggtatcagctcactcaaaggcggtaatacggttatccacagaatcaggggataacgcaggaaagaacatgtgagcaaaaggccagcaaaaggccaggaaccgtaaaaaggccgcgttgctggcgtttttccataggctccgcccccctgacgagcatcacaaaaatcgacgctcaagtcagaggtggcgaaacccgacaggactataaagataccaggcgtttccccctggaagctccctcgtgcgctctcctgttccgaccctgccgcttaccggatacctgtccgcctttctcccttcgggaagcgtggcgctttctcatagctcacgctgtaggtatctcagttcggtgtaggtcgttcgctccaagctgggctgtgtgcacgaaccccccgttcagcccgaccgctgcgccttatccggtaactatcgtcttgagtccaacccggtaagacacgacttatcgccactggcagcagccactggtaacaggattagcagagcgaggtatgtaggcggtgctacagagttcttgaagtggtggcctaactacggctacactagaaggacagtatttggtatctgcgctctgctgaagccagttaccttcggaaaaagagttggtagctcttgatccggcaaacaaaccaccgctggtagcggtggtttttttgtttgcaagcagcagattacgcgcagaaaaaaaggatctcaagaagatcctttgatcttttctactgaacggtgatccccaccggaattgcg

SEQ ID NO: 9923 - DNA, 4333 bp, Artificial Sequence
  pCMVKm2 vector
gccgcggaatttcgactctaggccattgcatacgttgtatctatatcataatatgtacatttatattggctcatgtccaatatgaccgccatgttgacattgattattgactagttattaatagtaatcaattacggggtcattagttcatagcccatatatggagttccgcgttacataacttacggtaaatggcccgcctggctgaccgcccaacgacccccgcccattgacgtcaataatgacgtatgttcccatagtaacgccaatagggactttccattgacgtcaatgggtggagtatttacggtaaactgcccacttggcagtacatcaagtgtatcatatgccaagtccgccccctattgacgtcaatgacggtaaatggcccgcctggcattatgcccagtacatgaccttacgggactttcctacttggcagtacatctacgtattagtcatcgctattaccatggtgatgcggttttggcagtacaccaatgggcgtggatagcggtttgactcacggggatttccaagtctccaccccattgacgtcaatgggagtttgttttggcaccaaaatcaacgggactttccaaaatgtcgtaataaccccgccccgttgacgcaaatgggcggtaggcgtgtacggtgggaggtctatataagcagagctcgtttagtgaaccgtcagatcgcctggagacgccatccacgctgttttgacctccatagaagacaccgggaccgatccagcctccgcggccgggaacggtgcattggaacgcggattccccgtgccaagagtgacgtaagtaccgcctatagactctataggcacacccctttggctcttatgcatgctatactgtttttggcttggggcctatacacccccgcttccttatgctataggtgatggtatagcttagcctataggtgtgggttattgaccattattgaccactcccctattggtgacgatactttccattactaatccataacatggctctttgccacaactatctctattggctatatgccaatactctgtccttcagagactgacacggactctgtatttttacaggatggggtcccatttattatttacaaattcacatatacaacaacgccgtcccccgtgcccgcagtttttattaaacatagcgtgggatctccacgcgaatctcgggtacgtgttccggacatgggctcttctccggtagcggcggagcttccacatccgagccctggtcccatgcctccagcggctcatggtcgctcggcagctccttgctcctaacagtggaggccagacttaggcacagcacaatgcccaccaccaccagtgtgccgcacaaggccgtggcggtagggtatgtgtctgaaaatgagctcggagattgggctcgcaccgctgacgcagatggaagacttaaggcagcggcagaagaagatgcaggcagctgagttgttgtattctgataagagtcagaggtaactcccgttgcggtgctgttaacggtggagggcagtgtagtctgagcagtactcgttgctgccgcgcgcgccaccagacataatagctgacagactaacagactgttcctttccatgggtcttttctgcagtcaccgtcgtcgacctaagaattcagactcgagcaagtctagaaagccatggatatcggatccactacgcgttagagctcgctgatcagcctcgactgtgccttctagttgccagccatctgttgtttgcccctcccccgtgccttccttgaccctggaaggtgccactcccactgtcctttcctaataaaatgaggaaattgcatcgcattgtctgagtaggtgtcattctattctggggggtggggtggggcaggacagcaagggggaggattgggaagacaatagcaggggggtgggcgaagaactccagcatgagatccccgcgctggaggatcatccagccggcgtcccggaaaacgattccgaagcccaacctttcatagaaggcggcggtggaatcgaaatctcgtgatggcaggttgggcgtcgcttggtcggtcatttcgaaccccagagtcccgctcagaagaactcgtcaagaaggcgatagaaggcgatgcgctgcgaatcgggagcggcgataccgtaaagcacgaggaagcggtcagcccattcgccgccaagctcttcagcaatatcacgggtagccaacgctatgtcctgatagcggtccgccacacccagccggccacagtcgatgaatccagaaaagcggccattttccaccatgatattcggcaagcaggcatcgccatgggtcacgacgagatcctcgccgtcgggcatgcgcgccttgagcctggcgaacagttcggctggcgcgagcccctgatgctcttcgtccagatcatcctgatcgacaagaccggcttccatccgagtacgtgctcgctcgatgcgatgtttcgcttggtggtcgaatgggcaggtagccggatcaagcgtatgcagccgccgcattgcatcagccatgatggatactttctcggcaggagcaaggtgagatgacaggagatcctgccccggcacttcgcccaatagcagccagtcccttcccgcttcagtgacaacgtcgagcacagctgcgcaaggaacgcccgtcgtggccagccacgatagccgcgctgcctcgtcctgcagttcattcagggcaccggacaggtcggtcttgacaaaaagaaccgggcgcccctgcgctgacagccggaacacggcggcatcagagcagccgattgtctgttgtgcccagtcatagccgaatagcctctccacccaagcggccggagaacctgcgtgcaatccatcttgttcaatcatgcgaaacgatcctcatcctgtctcttgatcagatcttgatcccctgcgccatcagatccttggcggcaagaaagccatccagtttactttgcagggcttcccaaccttaccagagggcgccccagctggcaattccggttcgcttgctgtccataaaaccgcccagtctagctatcgccatgtaagcccactgcaagctacctgctttctctttgcgcttgcgttttcccttgtccagatagcccagtagctgacattcatccggggtcagcaccgtttctgcggactggctttctacgtgttccgcttcctttagcagcccttgcgccctgagtgcttgcggcagcgtgaagctaattcatggttaaatttttgttaaatcagctcattttttaaccaataggccgaaatcggcaaaatcccttataaatcaaaagaatagcccgagatagggttgagtgttgttccagtttggaacaagagtccactattaaagaacgtggactccaacgtcaaagggcgaaaaaccgtctatcagggcgatggccggatcagcttatgcggtgtgaaataccgcacagatgcgtaaggagaaaataccgcatcaggcgctcttccgcttcctcgctcactgactcgctgcgctcggtcgttcggctgcggcgagcggtatcagctcactcaaaggcggtaatacggttatccacagaatcaggggataacgcaggaaagaacatgtgagcaaaaggccagcaaaaggccaggaaccgtaaaaaggccgcgttgctggcgtttttccataggctccgcccccctgacgagcatcacaaaaatcgacgctcaagtcagaggtggcgaaacccgacaggactataaagataccaggcgtttccccctggaagctccctcgtgcgctctcctgttccgaccctgccgcttaccggatacctgtccgcctttctcccttcgggaagcgtggcgctttctcatagctcacgctgtaggtatctcagttcggtgtaggtcgttcgctccaagctgggctgtgtgcacgaaccccccgttcagcccgaccgctgcgccttatccggtaactatcgtcttgagtccaacccggtaagacacgacttatcgccactggcagcagccactggtaacaggattagcagagcgaggtatgtaggcggtgctacagagttcttgaagtggtggcctaactacggctacactagaaggacagtatttggtatctgcgctctgctgaagccagttaccttcggaaaaagagttggtagctcttgatccggcaaacaaaccaccgctggtagcggtggtttttttgtttgcaagcagcagattacgcgcagaaaaaaaggatctcaagaagatcctttgatcttttctactgaacggtgatccccaccggaattgcg

SEQ ID NO: 9924 - DNA, 1288 bp, Artificial Sequence
  Optimized nucleocapsid sequence
gtcgacgccaccatgagcgacaacggcccccagagcaaccagcgcagcgccccccgcatcaccttcggcggccccaccgacagcaccgacaacaaccagaacggcggccgcaacggcgcccgccccaagcagcgccgcccccagggcctgcccaacaacatcgccagctggttcaccgccctgacccagcacggcaaggaggagctgcgcttcccccgcggccagggcgtgcccatcaacaccaacagcggccccgacgaccagatcggctactaccgccgcgccacccgccgcgtgcgcggcggcgacggcaagatgaaggagctgagcccccgctggtacttctactacctgggcaccggccccgaggccagcctgccctacggcgccaacaaggagggcatcgtgtgggtggccaccgagggcgccctgaacacccccaaggaccacatcggcacccgcaaccccaacaacaacgccgccaccgtgctgcagctgccccagggcaccaccctgcccaagggcttctacgccgagggcagccgcggcggcagccaggccagcagccgcagcagcagccgcagccgcggcaacagccgcaacagcacccccggcagcagccgcggcaacagccccgcccgcatggccagcggcggcggcgagaccgccctggccctgctgctgctggaccgcctgaaccagctggagagcaaggtgagcggcaagggccagcagcagcagggccagaccgtgaccaagaagagcgccgccgaggccagcaagaagccccgccagaagcgcaccgccaccaagcagtacaacgtgacccaggccttcggccgccgcggccccgagcagacccagggcaacttcggcgaccaggacctgatccgccagggcaccgactacaagcactggccccagatcgcccagttcgcccccagcgccagcgccttcttcggcatgagccgcatcggcatggaggtgacccccagcggcacctggctgacctaccacggcgccatcaagctggacgacaaggacccccagttcaaggacaacgtgatcctgctgaacaagcacatcgacgcctacaagaccttcccccccaccgagcccaagaaggacaagaagaagaagaccgacgaggcccagcccctgccccagcgccagaagaagcagcccaccgtgaccctgctgcccgccgccgacatggacgacttcagccgccagctgcagaacagcatgagcggcgccagcgccgacagcacccaggcctaaagaattc

SEQ ID NO: 9925 - DNA, 688 bp, Artificial Sequence
  Optimized matrix sequence
gtcgacgccaccatggccgacaacggcaccatcaccgtggaggagctgaagcagctgctggagcagtggaacctggtgatcggcttcctgttcctggcctggatcatgctgctgcagttcgcctacagcaaccgcaaccgcttcctgtacatcatcaagctggtgttcctgtggctgctgtggcccgtgaccctggcctgcttcgtgctggccgtggtgtaccgcatcaactgggtgaccggcggcatcgccatcgccatggcctgcatcgtgggcctgatgtggctgagctacttcgtggccagcttccgcctgttcgcccgcacccgcagcatgtggagcttcaaccccgagaccaacatcctgctgaacgtgcccctgcgcggcaccatcgtgacccgccccctgatggagagcgagctggtgatcggcgccgtgatcatccgcggccacctgcgcatggccggccacagcctgggccgctgcgacatcaaggacctgcccaaggagatcaccgtggccaccagccgcaccctgagctactacaagctgggcgccagccagcgcgtgggcaccgacagcggcttcgccgcctacaaccgctaccgcatcggcaactacaagctgaacaccgaccacgccggcagcaacgacaacatcgccctgctggtgcaggcctaaagaattc

SEQ ID NO: 9926 - DNA, 252 bp, Artificial Sequence
  Optimized envelope sequence
gtcgacgccaccatgtacagcttcgtgagcgaggagaccggcaccctgatcgtgaacagcgtgctgctgttcctggccttcgtggtgttcctgctggtgaccctggccatcctgaccgccctgcgcctgtgcgcctactgctgcaacatcgtgaacgtgagcctggtgaagcccaccgtgtacgtgtacagccgcgtgaagaacctgaacagcagcgagggcgtgcccgacctgctggtggcctaagaattc

SEQ ID NO: 9927 - DNA, 302 bp, Artificial Sequence
  SARS coronavirus amplicon BNI-1
taccgtagactcatctctatgatgggtttcaaaatgaattaccaagtcaatggttaccctaatatgtttatcacccgcgaagaagctattcgtcacgttcgtgcgtggattggctttgatgtagagggctgtcatgcaactagagatgctgtgggtactaacctacctctccagctaggattttctacaggtgttaacttagtagctgtaccgactggttatgttgacactgaaaataacacagaattcaccagagttaatgcaaaacctccaccaggtgaccagtttaaacatcttatacc

SEQ ID NO: 9928 - protein, 100 aa, Artificial Sequence
  Inferred translation product from SEQ ID NO: 9927
YRRLISMMGFKMNYQVNGYPNMFITREEAIRHVRAWIGFDVEGCHATRDAVGTNLPLQLGFSTGVNLVAVPTGYVDTENNTEFTRVNAKPPPGDQFKHLI

SEQ ID NO: 9929 - protein, 6 aa, Artificial Sequence
  Inferred translation product from SEQ ID NO: 9927
TVDSSL

SEQ ID NO: 9930 - protein, 4 aa, Artificial Sequence
  Inferred translation product from SEQ ID NO: 9927
WVSK

SEQ ID NO: 9931 - protein, 28 aa, Artificial Sequence
  Inferred translation product from SEQ ID NO: 9927
ITKSMVTLICLSPAKKLFVTFVRGLALM

SEQ ID NO: 9932 - protein, 17 aa, Artificial Sequence
  Inferred translation product from SEQ ID NO: 9927
RAVMQLEMLWVLTYLSS

SEQ ID NO: 9933 - protein, 7 aa, Artificial Sequence
  Inferred translation product from SEQ ID NO: 9927
DFLQVLT

SEQ ID NO: 9934 - protein, 32 aa, Artificial Sequence
  Inferred translation product from SEQ ID NO: 9927
LYRLVMLTLKITQNSPELMQNLHQVTSLNILY

SEQ ID NO: 9935 - protein, 17 aa, Artificial Sequence
  Inferred translation product from SEQ ID NO: 9927
THLYDGFQNELPSQWLP

SEQ ID NO: 9936 - protein, 18 aa, Artificial Sequence
  Inferred translation product from SEQ ID NO: 9927
YVYHPRRSYSSRSCVDWL

SEQ ID NO: 9937 - protein, 7 aa, Artificial Sequence
  Inferred translation product from SEQ ID NO: 9927
CRGLSCN

SEQ ID NO: 9938 - protein, 5 aa, Artificial Sequence
  Inferred translation product from SEQ ID NO: 9927
RCCGY

SEQ ID NO: 9939 - protein, 11 aa, Artificial Sequence
  Inferred translation product from SEQ ID NO: 9927
PTSPARIFYRC

SEQ ID NO: 9940 - protein, 9 aa, Artificial Sequence
  Inferred translation product from SEQ ID NO: 9927
LSSCTDWLC

SEQ ID NO: 9941 - protein, 6 aa, Artificial Sequence
  Inferred translation product from SEQ ID NO: 9927
HRIHQS

SEQ ID NO: 9942 - protein, 6 aa, Artificial Sequence
  Inferred translation product from SEQ ID NO: 9927
CKTSTR

SEQ ID NO: 9943 - protein, 4 aa, Artificial Sequence
  Inferred translation product from SEQ ID NO: 9927
TSYT

SEQ ID NO: 9944 - protein, 27 aa, Artificial Sequence
  Inferred translation product from SEQ ID NO: 9927
GIRCLNWSPGGGFALTLVNSVLFSVST

SEQ ID NO: 9945 - protein, 28 aa, Artificial Sequence
  Inferred translation product from SEQ ID NO: 9927
PVGTATKLTPVENPSWRGRLVPTASLVA

SEQ ID NO: 9946 - protein, 12 aa, Artificial Sequence
  Inferred translation product from SEQ ID NO: 9927
QPSTSKPIHART

SEQ ID NO: 9947 - protein, 12 aa, Artificial Sequence
  Inferred translation product from SEQ ID NO: 9927
RIASSRVINILG

SEQ ID NO: 9948 - protein, 4 aa, Artificial Sequence
  Inferred translation product from SEQ ID NO: 9927
PLTW

SEQ ID NO: 9949 - protein, 12 aa, Artificial Sequence
  Inferred translation product from SEQ ID NO: 9927
FILKPIIEMSLR

SEQ ID NO: 9950 - protein, 9 aa, Artificial Sequence
  Inferred translation product from SEQ ID NO: 9927
TGHLVEVLH

SEQ ID NO: 9951 - protein, 17 aa, Artificial Sequence
  Inferred translation product from SEQ ID NO: 9927
ILCYFQCQHNQSVQLLS

SEQ ID NO: 9952 - protein, 8 aa, Artificial Sequence
  Inferred translation product from SEQ ID NO: 9927
KILAGEVG

SEQ ID NO: 9953 - protein, 5 aa, Artificial Sequence
  Inferred translation product from SEQ ID NO: 9927
YPQHL

SEQ ID NO: 9954 - protein, 17 aa, Artificial Sequence
  Inferred translation product from SEQ ID NO: 9927
LHDSPLHQSQSTHERDE

SEQ ID NO: 9955 - protein, 4 aa, Artificial Sequence
  Inferred translation product from SEQ ID NO: 9927
LLRG

SEQ ID NO: 9956 - protein, 5 aa, Artificial Sequence
  Inferred translation product from SEQ ID NO: 9927
LGNSF

SEQ ID NO: 9957 - protein, 33 aa, Artificial Sequence
  Inferred translation product from SEQ ID NO: 9927
YKMFKLVTWWRFCINSGEFCVIFSVNITSRYSY

SEQ ID NO: 9958 - protein, 7 aa, Artificial Sequence
  Inferred translation product from SEQ ID NO: 9927
VNTCRKS

SEQ ID NO: 9959 - protein, 54 aa, Artificial Sequence
  Inferred translation product from SEQ ID NO: 9927
VSTHSISSCMTALYIKANPRTNVTNSFFAGDKHIRVTIDLVIHFETHHRDESTV

SEQ ID NO: 9960 - protein, 7073 aa, SARS coronavirus
MESLVLGVNEKTHVQLSLPVLQVRDVLVRGFGDSVEEALSEAREHLKNGTCGLVELEKGVLPQLEQPYVFIKRSDALSTNHGHKVVELVAEMDGIQYGRSGITLGVLVPHVGETPIAYRNVLLRKNGNKGAGGHSYGIDLKSYDLGDELGTDPIEDYEQNWNTKHGSGALRELTRELNGGAVTRYVDNNFCGPDGYPLDCIKDFLARAGKSMCTLSEQLDYIESKRGVYCCRDHEHEIAWFTERSDKSYEHQTPFEIKSAKKFDTFKGECPKFVFPLNSKVKVIQPRVEKKKTEGFMGRIRSVYPVASPQECNNMHLSTLMKCNHCDEVSWQTCDFLKATCEHCGTENLVIEGPTTCGYLPTNAVVKMPCPACQDPEIGPEHSVADYHNHSNIETRLRKGGRTRCFGGCVFAYVGCYNKRAYWVPRASADIGSGHTGITGDNVETLNEDLLEILSRERVNINIVGDFHLNEEVAIILASFSASTSAFIDTIKSLDYKSFKTIVESCGNYKVTKGKPVKGAWNIGQQRSVLTPLCGFPSQAAGVIRSIFARTLDAANHSIPDLQRAAVTILDGISEQSLRLVDAMVYTSDLLTNSVIIMAYVTGGLVQQTSQWLSNLLGTTVEKLRPIFEWIEAKLSAGVEFLKDAWEILKFLITGVFDIVKGQIQVASDNIKDCVKCFIDVVNKALEMCIDQVTIAGAKLRSLNLGEVFIAQSKGLYRQCIRGKEQLQLLMPLKAPKEVTFLEGDSHDTVLTSEEVVLKNGELETLETPVDSFTNGAIVGTPVCVNGLMLLEIKDKEQYCALSPGLLATNNVFRLKGGAPIKGVTFGEDTVWEVQGYKNVRITFELDERVDKVLNEKCSVYTVESGTEVTEFACVVAEAVVKTLQPVSDLLTNMGIDLDEWSVATFYLFDDAGEENFSSRMYCSFYPPDEEEEDDAECEEEEIDETCEHEYGTEDDYQGLPLEFGASAETVRVEEEEEEDWLDDTTEQSEIEPEPEPTPEEPVNQFTGYLKLTDNVAIKCVDIVKEAQSANPMVIVNAANIHLKHGGGVAGALNKATNGAMQKESDDYIKLNGPLTVGGSCLLSGHNLAKKCLHVVGPNLNAGEDIQLLKAAYENFNSQDILLAPLLSAGIFGAKPLQSLQVCVQTVRTQVYIAVNDKALYEQVVMDYLDNLKPRVEAPKQEEPPNTEDSKTEEKSVVQKPVDVKPKIKACIDEVTTTLEETKFLTNKLLLFADINGKLYHDSQNMLRGEDMSFLEKDAPYMVGDVITSGDITCVVIPSKKAGGTTEMLSRALKKVPVDEYITTYPGQGCAGYTLEEAKTALKKCKSAFYVLPSEAPNAKEEILGTVSWNLREMLAHAEETRKLMPICMDVRAIMATIQRKYKGIKIQEGIVDYGVRFFFYTSKEPVASIITKLNSLNEPLVTMPIGYVTHGFNLEEAARCMRSLKAPAVVSVSSPDAVTTYNGYLTSSSKTSEEHFVETVSLAGSYRDWSYSGQRTELGVEFLKRGDKIVYHTLESPVEFHLDGEVLSLDKLKSLLSLREVKTIKVFTTVDNTNLHTQLVDMSMTYGQQFGPTYLDGADVTKIKPHVNHEGKTFFVLPSDDTLRSEAFEYYHTLDESFLGRYMSALNHTKKWKFPQVGGLTSIKWADNNCYLSSVLLALQQLEVKFNAPALQEAYYRARAGDAANFCALILAYSNKTVGELGDVRETMTHLLQHANLESAKRVLNVVCKHCGQKTTTLTGVEAVMYMGTLSYDNLKTGVSIPCVCGRDATQYLVQQESSFVMMSAPPAEYKLQQGTFLCANEYTGNYQCGHYTHITAKETLYRIDGAHLTKMSEYKGPVTDVFYKETSYTTTIKPVSYKLDGVTYTEIEPKLDGYYKKDNAYYTEQPIDLVPTQPLPNASFDNFKLTCSNTKFADDLNQMTGFTKPASRELSVTFFPDLNGDVVAIDYRHYSASFKKGAKLLHKPIVWHINQATTKTTFKPNTWCLRCLWSTKPVDTSNSFEVLAVEDTQGMDNLACESQQPTSEEVVENPTIQKEVIECDVKTTEVVGNVILKPSDEGVKVTQELGHEDLMAAYVENTSITIKKPNELSLALGLKTIATHGIAAINSVPWSKILAYVKPFLGQAAITTSNCAKRLAQRVFNNYMPYVFTLLFQLCTFTKSTNSRIRASLPTTIAKNSVKSVAKLCLDAGINYVKSPKFSKLFTIAMWLLLLSICLGSLICVTAAFGVLLSNFGAPSYCNGVRELYLNSSNVTTMDFCEGSFPCSICLSGLDSLDSYPALETIQVTISSYKLDLTILGLAAEWVLAYMLFTKFFYLLGLSAIMQVFFGYFASHFISNSWLMWFIISIVQMAPVSAMVRMYIFFASFYYIWKSYVHIMDGCTSSTCMMCYKRNRATRVECTTIVNGMKRSFYVYANGGRGFCKTHNWNCLNCDTFCTGSTFISDEVARDLSLQFKRPINPTDQSSYIVDSVAVKNGALHLYFDKAGQKTYERHPLSHFVNLDNLRANNTKGSLPINVIVFDGKSKCDESASKSASVYYSQLMCQPILLLDQALVSDVGDSTEVSVKMFDAYVDTFSATFSVPMEKLKALVATAHSELAKGVALDGVLSTFVSAARQGVVDTDVDTKDVIECLKLSHHSDLEVTGDSCNNFMLTYNKVENMTPRDLGACIDCNARHINAQVAKSHNVSLIWNVKDYMSLSEQLRKQIRSAAKKNNIPFRLTCATTRQVVNVITTKISLKGGKIVSTCFKLMLKATLLCVLAALVCYIVMPVHTLSIHDGYTNEIIGYKAIQDGVTRDIISTDDCFANKHAGFDAWFSQRGGSYKNDKSCPVVAAIITREIGFIVPGLPGTVLRAINGDFLHFLPRVFSAVGNICYTPSKLIEYSDFATSACVLAAECTIFKDAMGKPVPYCYDTNLLEGSISYSELRPDTRYVLMDGSIIQFPNTYLEGSVRVVTTFDAEYCRHGTCERSEVGICLSTSGRWVLNNEHYRALSGVFCGVDAMNLIANIFTPLVQPVGALDVSASVVAGGIIAILVTCAAYYFMKFRRVFGEYNHVVAANALLFLMSFTILCLVPAYSFLPGVYSVFYLYLTFYFTNDVSFLAHLQWFAMFSPIVPFWITAIYVFCISLKHCHWFFNNYLRKRVMFNGVTFSTFEEAALCTFLLNKEMYLKLRSETLLPLTQYNRYLALYNKYKYFSGALDTTSYREAACCHLAKALNDFSNSGADVLYQPPQTSITSAVLQSGFRKMAFPSGKVEGCMVQVTCGTTTLNGLWLDDTVYCPRHVICTAEDMLNPNYEDLLIRKSNHSFLVQAGNVQLRVIGHSMQNCLLRLKVDTSNPKTPKYKFVRIQPGQTFSVLACYNGSPSGVYQCAMRPNHTIKGSFLNGSCGSVGFNIDYDCVSFCYMHHMELPTGVHAGTDLEGKFYGPFVDRQTAQAAGTDTTITLNVLAWLYAAVINGDRWFLNRFTTTLNDFNLVAMKYNYEPLTQDHVDILGPLSAQTGIAVLDMCAALKELLQNGMNGRTILGSTILEDEFTPFDVVRQCSGVTFQGKFKKIVKGTHHWMLLTFLTSLLILVQSTQWSLFFFVYENAFLPFTLGIMAIAACAMLLVKHKHAFLCLFLLPSLATVAYFNMVYMPASWVMRIMTWLELADTSLSGYRLKDCVMYASALVLLILMTARTVYDDAARRVWTLMNVITLVYKVYYGNALDQAISMWALVISVTSNYSGVVTTIMFLARAIVFVCVEYYPLLFITGNTLQCIMLVYCFLGYCCCCYFGLFCLLNRYFRLTLGVYDYLVSTQEFRYMNSQGLLPPKSSIDAFKLNIKLLGIGGKPCIKVATVQSKMSDVKCTSVVLLSVLQQLRVESSSKLWAQCVQLHNDILLAKDTTEAFEKMVSLLSVLLSMQGAVDINRLCEEMLDNRATLQAIASEFSSLPSYAAYATAQEAYEQAVANGDSEVVLKKLKKSLNVAKSEFDRDAAMQRKLEKMADQAMTQMYKQARSEDKRAKVTSAMQTMLFTMLRKLDNDALNNIINNARDGCVPLNIIPLTTAAKLMVVVPDYGTYKNTCDGNTFTYASALWEIQQVVDADSKIVQLSEINMDNSPNLAWPLIVTALRANSAVKLQNNELSPVALRQMSCAAGTTQTACTDDNALAYYNNSKGGRFVLALLSDHQDLKWARFPKSDGTGTIYTELEPPCRFVTDTPKGPKVKYLYFIKGLNNLNRGMVLGSLAATVRLQAGNATEVPANSTVLSFCAFAVDPAKAYKDYLASGGQPITNCVKMLCTHTGTGQAITVTPEANMDQESFGGASCCLYCRCHIDHPNPKGFCDLKGKYVQIPTTCANDPVGFTLRNTVCTVCGMWKGYGCSCDQLREPLMQSADASTFLNRVCGVSAARLTPCGTGTSTDVVYRAFDIYNEKVAGFAKFLKTNCCRFQEKDEEGNLLDSYFVVKRHTMSNYQHEETIYNLVKDCPAVAVHDFFKFRVDGDMVPHISRQRLTKYTMADLVYALRHFDEGNCDTLKEILVTYNCCDDDYFNKKDWYDFVENPDILRVYANLGERVRQSLLKTVQFCDAMRDAGIVGVLTLDNQDLNGNWYDFGDFVQVAPGCGVPIVDSYYSLLMPILTLTRALAAESHMDADLAKPLIKWDLLKYDFTEERLCLFDRYFKYWDQTYHPNCINCLDDRCILHCANFNVLFSTVFPPTSFGPLVRKIFVDGVPFVVSTGYHFRELGVVHNQDVNLHSSRLSFKELLVYAADPAMHAASGNLLLDKRTTCFSVAALTNNVAFQTVKPGNFNKDFYDFAVSKGFFKEGSSVELKHFFFAQDGNAAISDYDYYRYNLPTMCDIRQLLFVVEVVDKYFDCYDGGCINANQVIVNNLDKSAGFPFNKWGKARLYYDSMSYEDQDALFAYTKRNVIPTITQMNLKYAISAKNRARTVAGVSICSTMTNRQFHQKLLKSIAATRGATVVIGTSKFYGGWHNMLKTVYSDVETPHLMGWDYPKCDRAMPNMLRIMASLVLARKHNTCCNLSHRFYRLANECAQVLSEMVMCGGSLYVKPGGTSSGDATTAYANSVFNICQAVTANVNALLSTDGNKIADKYVRNLQHRLYECLYRNRDVDHEFVDEFYAYLRKHFSMMILSDDAVVCYNSNYAAQGLVASIKNFKAVLYYQNNVFMSEAKCWTETDLTKGPHEFCSQHTMLVKQGDDYVYLPYPDPSRILGAGCFVDDIVKTDGTLMIERFVSLAIDAYPLTKHPNQEYADVFHLYLQYIRKLHDELTGHMLDMYSVMLTNDNTSRYWEPEFYEAMYTPHTVLQAVGACVLCNSQTSLRCGACIRRPFLCCKCCYDHVISTSHKLVLSVNPYVCNAPGCDVTDVTQLYLGGMSYYCKSHKPPISFPLCANGQVFGLYKNTCVGSDNVTDFNAIATCDWTNAGDYILANTCTERLKLFAAETLKATEETFKLSYGIATVREVLSDRELHLSWEVGKPRPPLNRNYVFTGYRVTKNSKVQIGEYTFEKGDYGDAVVYRGTTTYKLNVGDYFVLTSHTVMPLSAPTLVPQEHYVRITGLYPTLNISDEFSSNVANYQKVGMQKYSTLQGPPGTGKSHFAIGLALYYPSARIVYTACSHAAVDALCEKALKYLPIDKCSRIIPARARVECFDKFKVNSTLEQYVFCTVNALPETTADIVVFDEISMATNYDLSVVNARLRAKHYVYIGDPAQLPAPRTLLTKGTLEPEYFNSVCRLMKTIGPDMFLGTCRRCPAEIVDTVSALVYDNKLKAHKDKSAQCFKMFYKGVITHDVSSAINRPQIGVVREFLTRNPAWRKAVFISPYNSQNAVASKILGLPTQTVDSSQGSEYDYVIFTQTTETAHSCNVNRFNVAITRAKIGILCIMSDRDLYDKLQFTSLEIPRRNVATLQAENVTGLFKDCSKIITGLHPTQAPTHLSVDIKFKTEGLCVDIPGIPKDMTYRRLISMMGFKMNYQVNGYPNMFITREEAIRHVRAWIGFDVEGCHATRDAVGTNLPLQLGFSTGVNLVAVPTGYVDTENNTEFTRVNAKPPPGDQFKHLIPLMYKGLPWNVVRIKIVQMLSDTLKGLSDRVVFVLWAHGFELTSMKYFVKIGPERTCCLCDKRATCFSTSSDTYACWNHSVGFDYVYNPFMIDVQQWGFTGNLQSNHDQHCQVHGNAHVASCDAIMTRCLAVHECFVKRVDWSVEYPIIGDELRVNSACRKVQHMVVKSALLADKFPVLHDIGNPKAIKCVPQAEVEWKFYDAQPCSDKAYKIEELFYSYAIHHDKFTDGVCLFWNCNVDRYPANAIVCRFDTRVLSNLNLPGCDGGSLYVNKHAFHTPAFDKSAFTNLKQLPFFYYSDSPCESHGKQVVSDIDYVPLKSATCITRCNLGGAVCRHHANEYRQYLDAYNMMISAGFSLWIYKQFDTYNLWNTFTRLQSLENVAYNVVNKGHFDGHAGEAPVSIINNAVYTKVDGIDVEIFENKTTLPVNVAFELWAKRNIKPVPEIKILNNLGVDIAANTVIWDYKREAPAHVSTIGVCTMTDIAKKPTESACSSLTVLFDGRVEGQVDLFRNARNGVLITEGSVKGLTPSKGPAQASVNGVTLIGESVKTQFNYFKKVDGIIQQLPETYFTQSRDLEDFKPRSQMETDFLELAMDEFIQRYKLEGYAFEHIVYGDFSHGQLGGLHLMIGLAKRSQDSPLKLEDFIPMDSTVKNYFITDAQTGSSKCVCSVIDLLLDDFVEIIKSQDLSVISKVVKVTIDYAEISFMLWCKDGHVETFYPKLQASQAWQPGVAMPNLYKMQRMLLEKCDLQNYGENAVIPKGIMMNVAKYTQLCQYLNTLTLAVPYNMRVIHFGAGSDKGVAPGTAVLRQWLPTGTLLVDSDLNDFVSDADSTLIGDCATVHTANKWDLIISDMYDPRTKHVTKENDSKEGFFTYLCGFIKQKLALGGSIAVKITEHSWNADLYKLMGHFSWWTAFVTNVNASSSEAFLIGANYLGKPKEQIDGYTMHANYIFWRNTNPIQLSSYSLFDMSKFPLKLRGTAVMSLKENQINDMIYSLLEKGRLIIRENNRVVVSSDILVNN

SEQ ID NO: 9961 - protein, 4382 aa, SARS coronavirus
MESLVLGVNEKTHVQLSLPVLQVRDVLVRGFGDSVEEALSEAREHLKNGTCGLVELEKGVLPQLEQPYVFIKRSDALSTNHGHKVVELVAEMDGIQYGRSGITLGVLVPHVGETPIAYRNVLLRKNGNKGAGGHSYGIDLKSYDLGDELGTDPIEDYEQNWNTKHGSGALRELTRELNGGAVTRYVDNNFCGPDGYPLDCIKDFLARAGKSMCTLSEQLDYIESKRGVYCCRDHEHEIAWFTERSDKSYEHQTPFEIKSAKKFDTFKGECPKFVFPLNSKVKVIQPRVEKKKTEGFMGRIRSVYPVASPQECNNMHLSTLMKCNHCDEVSWQTCDFLKATCEHCGTENLVIEGPTTCGYLPTNAVVKMPCPACQDPEIGPEHSVADYHNHSNIETRLRKGGRTRCFGGCVFAYVGCYNKRAYWVPRASADIGSGHTGITGDNVETLNEDLLEILSRERVNINIVGDFHLNEEVAIILASFSASTSAFIDTIKSLDYKSFKTIVESCGNYKVTKGKPVKGAWNIGQQRSVLTPLCGFPSQAAGVIRSIFARTLDAANHSIPDLQRAAVTILDGISEQSLRLVDAMVYTSDLLTNSVIIMAYVTGGLVQQTSQWLSNLLGTTVEKLRPIFEWIEAKLSAGVEFLKDAWEILKFLITGVFDIVKGQIQVASDNIKDCVKCFIDVVNKALEMCIDQVTIAGAKLRSLNLGEVFIAQSKGLYRQCIRGKEQLQLLMPLKAPKEVTFLEGDSHDTVLTSEEVVLKNGELETLETPVDSFTNGAIVGTPVCVNGLMLLEIKDKEQYCALSPGLLATNNVFRLKGGAPIKGVTFGEDTVWEVQGYKNVRITFELDERVDKVLNEKCSVYTVESGTEVTEFACVVAEAVVKTLQPVSDLLTNMGIDLDEWSVATFYLFDDAGEENFSSRMYCSFYPPDEEEEDDAECEEEEIDETCEHEYGTEDDYQGLPLEFGASAETVRVEEEEEEDWLDDTTEQSEIEPEPEPTPEEPVNQFTGYLKLTDNVAIKCVDIVKEAQSANPMVIVNAANIHLKHGGGVAGALNKATNGAMQKESDDYIKLNGPLTVGGSCLLSGHNLAKKCLHVVGPNLNAGEDIQLLKAAYENFNSQDILLAPLLSAGIFGAKPLQSLQVCVQTVRTQVYIAVNDKALYEQVVMDYLDNLKPRVEAPKQEEPPNTEDSKTEEKSVVQKPVDVKPKIKACIDEVTTTLEETKFLTNKLLLFADINGKLYHDSQNMLRGEDMSFLEKDAPYMVGDVITSGDITCVVIPSKKAGGTTEMLSRALKKVPVDEYITTYPGQGCAGYTLEEAKTALKKCKSAFYVLPSEAPNAKEEILGTVSWNLREMLAHAEETRKLMPICMDVRAIMATIQRKYKGIKIQEGIVDYGVRFFFYTSKEPVASIITKLNSLNEPLVTMPIGYVTHGFNLEEAARCMRSLKAPAVVSVSSPDAVTTYNGYLTSSSKTSEEHFVETVSLAGSYRDWSYSGQRTELGVEFLKRGDKIVYHTLESPVEFHLDGEVLSLDKLKSLLSLREVKTIKVFTTVDNTNLHTQLVDMSMTYGQQFGPTYLDGADVTKIKPHVNHEGKTFFVLPSDDTLRSEAFEYYHTLDESFLGRYMSALNHTKKWKFPQVGGLTSIKWADNNCYLSSVLLALQQLEVKFNAPALQEAYYRARAGDAANFCALILAYSNKTVGELGDVRETMTHLLQHANLESAKRVLNVVCKHCGQKTTTLTGVEAVMYMGTLSYDNLKTGVSIPCVCGRDATQYLVQQESSFVMMSAPPAEYKLQQGTFLCANEYTGNYQCGHYTHITAKETLYRIDGAHLTKMSEYKGPVTDVFYKETSYTTTIKPVSYKLDGVTYTEIEPKLDGYYKKDNAYYTEQPIDLVPTQPLPNASFDNFKLTCSNTKFADDLNQMTGFTKPASRELSVTFFPDLNGDVVAIDYRHYSASFKKGAKLLHKPIVWHINQATTKTTFKPNTWCLRCLWSTKPVDTSNSFEVLAVEDTQGMDNLACESQQPTSEEVVENPTIQKEVIECDVKTTEVVGNVILKPSDEGVKVTQELGHEDLMAAYVENTSITIKKPNELSLALGLKTIATHGIAAINSVPWSKILAYVKPFLGQAAITTSNCAKRLAQRVFNNYMPYVFTLLFQLCTFTKSTNSRIRASLPTTIAKNSVKSVAKLCLDAGINYVKSPKFSKLFTIAMWLLLLSICLGSLICVTAAFGVLLSNFGAPSYCNGVRELYLNSSNVTTMDFCEGSFPCSICLSGLDSLDSYPALETIQVTISSYKLDLTILGLAAEWVLAYMLFTKFFYLLGLSAIMQVFFGYFASHFISNSWLMWFIISIVQMAPVSAMVRMYIFFASFYYIWKSYVHIMDGCTSSTCMMCYKRNRATRVECTTIVNGMKRSFYVYANGGRGFCKTHNWNCLNCDTFCTGSTFISDEVARDLSLQFKRPINPTDQSSYIVDSVAVKNGALHLYFDKAGQKTYERHPLSHFVNLDNLRANNTKGSLPINVIVFDGKSKCDESASKSASVYYSQLMCQPILLLDQALVSDVGDSTEVSVKMFDAYVDTFSATFSVPMEKLKALVATAHSELAKGVALDGVLSTFVSAARQGVVDTDVDTKDVIECLKLSHHSDLEVTGDSCNNFMLTYNKVENMTPRDLGACIDCNARHINAQVAKSHNVSLIWNVKDYMSLSEQLRKQIRSAAKKNNIPFRLTCATTRQVVNVITTKISLKGGKIVSTCFKLMLKATLLCVLAALVCYIVMPVHTLSIHDGYTNEIIGYKAIQDGVTRDIISTDDCFANKHAGFDAWFSQRGGSYKNDKSCPVVAAIITREIGFIVPGLPGTVLRAINGDFLHFLPRVFSAVGNICYTPSKLIEYSDFATSACVLAAECTIFKDAMGKPVPYCYDTNLLEGSISYSELRPDTRYVLMDGSIIQFPNTYLEGSVRVVTTFDAEYCRHGTCERSEVGICLSTSGRWVLNNEHYRALSGVFCGVDAMNLIANIFTPLVQPVGALDVSASVVAGGIIAILVTCAAYYFMKFRRVFGEYNHVVAANALLFLMSFTILCLVPAYSFLPGVYSVFYLYLTFYFTNDVSFLAHLQWFAMFSPIVPFWITAIYVFCISLKHCHWFFNNYLRKRVMFNGVTFSTFEEAALCTFLLNKEMYLKLRSETLLPLTQYNRYLALYNKYKYFSGALDTTSYREAACCHLAKALNDFSNSGADVLYQPPQTSITSAVLQSGFRKMAFPSGKVEGCMVQVTCGTTTLNGLWLDDTVYCPRHVICTAEDMLNPNYEDLLIRKSNHSFLVQAGNVQLRVIGHSMQNCLLRLKVDTSNPKTPKYKFVRIQPGQTFSVLACYNGSPSGVYQCAMRPNHTIKGSFLNGSCGSVGFNIDYDCVSFCYMHHMELPTGVHAGTDLEGKFYGPFVDRQTAQAAGTDTTITLNVLAWLYAAVINGDRWFLNRFTTTLNDFNLVAMKYNYEPLTQDHVDILGPLSAQTGIAVLDMCAALKELLQNGMNGRTILGSTILEDEFTPFDVVRQCSGVTFQGKFKKIVKGTHHWMLLTFLTSLLILVQSTQWSLFFFVYENAFLPFTLGIMAIAACAMLLVKHKHAFLCLFLLPSLATVAYFNMVYMPASWVMRIMTWLELADTSLSGYRLKDCVMYASALVLLILMTARTVYDDAARRVWTLMNVITLVYKVYYGNALDQAISMWALVISVTSNYSGVVTTIMFLARAIVFVCVEYYPLLFITGNTLQCIMLVYCFLGYCCCCYFGLFCLLNRYFRLTLGVYDYLVSTQEFRYMNSQGLLPPKSSIDAFKLNIKLLGIGGKPCIKVATVQSKMSDVKCTSVVLLSVLQQLRVESSSKLWAQCVQLHNDILLAKDTTEAFEKMVSLLSVLLSMQGAVDINRLCEEMLDNRATLQAIASEFSSLPSYAAYATAQEAYEQAVANGDSEVVLKKLKKSLNVAKSEFDRDAAMQRKLEKMADQAMTQMYKQARSEDKRAKVTSAMQTMLFTMLRKLDNDALNNIINNARDGCVPLNIIPLTTAAKLMVVVPDYGTYKNTCDGNTFTYASALWEIQQVVDADSKIVQLSEINMDNSPNLAWPLIVTALRANSAVKLQNNELSPVALRQMSCAAGTTQTACTDDNALAYYNNSKGGRFVLALLSDHQDLKWARFPKSDGTGTIYTELEPPCRFVTDTPKGPKVKYLYFIKGLNNLNRGMVLGSLAATVRLQAGNATEVPANSTVLSFCAFAVDPAKAYKDYLASGGQPITNCVKMLCTHTGTGQAITVTPEANMDQESFGGASCCLYCRCHIDHPNPKGFCDLKGKYVQIPTTCANDPVGFTLRNTVCTVCGMWKGYGCSCDQLREPLMQSADASTFLNGFAV

SEQ ID NO: 9962 - protein, 1255 aa, SARS coronavirus
MFIFLLFLTLTSGSDLDRCTTFDDVQAPNYTQHTSSMRGVYYPDEIFRSDTLYLTQDLFLPFYSNVTGFHTINHTFGNPVIPFKDGIYFAATEKSNVVRGWVFGSTMNNKSQSVIIINNSTNVVIRACNFELCDNPFFAVSKPMGTQTHTMIFDNAFNCTFEYISDAFSLDVSEKSGNFKHLREFVFKNKDGFLYVYKGYQPIDVVRDLPSGFNTLKPIFKLPLGINITNFRAILTAFSPAQDIWGTSAAAYFVGYLKPTTFMLKYDENGTITDAVDCSQNPLAELKCSVKSFEIDKGIYQTSNFRVVPSGDVVRFPNITNLCPFGEVFNATKFPSVYAWERKKISNCVADYSVLYNSTFFSTFKCYGVSATKLNDLCFSNVYADSFVVKGDDVRQIAPGQTGVIADYNYKLPDDFMGCVLAWNTRNIDATSTGNYNYKYRYLRHGKLRPFERDISNVPFSPDGKPCTPPALNCYWPLNDYGFYTTTGIGYQPYRVVVLSFELLNAPATVCGPKLSTDLIKNQCVNFNFNGLTGTGVLTPSSKRFQPFQQFGRDVSDFTDSVRDPKTSEILDISPCSFGGVSVITPGTNASSEVAVLYQDVNCTDVSTAIHADQLTPAWRIYSTGNNVFQTQAGCLIGAEHVDTSYECDIPIGAGICASYHTVSLLRSTSQKSIVAYTMSLGADSSIAYSNNTIAIPTNFSISITTEVMPVSMAKTSVDCNMYICGDSTECANLLLQYGSFCTQLNRALSGIAAEQDRNTREVFAQVKQMYKTPTLKYFGGFNFSQILPDPLKPTKRSFIEDLLFNKVTLADAGFMKQYGECLGDINARDLICAQKFNGLTVLPPLLTDDMIAAYTAALVSGTATAGWTFGAGAALQIPFAMQMAYRFNGIGVTQNVLYENQKQIANQFNKAISQIQESLTTTSTALGKLQDVVNQNAQALNTLVKQLSSNFGAISSVLNDILSRLDKVEAEVQIDRLITGRLQSLQTYVTQQLIRAAEIRASANLAATKMSECVLGQSKRVDFCGKGYHLMSFPQAAPHGVVFLHVTYVPSQERNFTTAPAICHEGKAYFPREGVFVFNGTSWFITQRNFFSPQIITTDNTFVSGNCDVVIGIINNTVYDPLQPELDSFKEELDKYFKNHTSPDVDFGDISGINASVVNIQKEIDRLNEVAKNLNESLIDLQELGKYEQYIKWPWYVWLGFIAGLIAIVMVTILLCCMTSCCSCLKGACSCGSCCKFDEDDSEPVLKGVKLHYT

SEQ ID NO: 9963 - protein, 221 aa, SARS coronavirus
MADNGTITVEELKQLLEQWNLVIGFLFLAWIMLLQFAYSNRNRFLYIIKLVFLWLLWPVTLACFVLAVVYRINWVTGGIAIAMACIVGLMWLSYFVASFRLFARTRSMWSFNPETNILLNVPLRGTIVTRPLMESELVIGAVIIRGHLRMAGHSLGRCDIKDLPKEITVATSRTLSYYKLGASQRVGTDSGFAAYNRYRIGNYKLNTDHAGSNDNIALLVQ

SEQ ID NO: 9964 - protein, 422 aa, SARS coronavirus
MSDNGPQSNQRSAPRITFGGPTDSTDNNQNGGRNGARPKQRRPQGLPNNIASWFTALTQHGKEELRFPRGQGVPINTNSGPDDQIGYYRRATRRVRGGDGKMKELSPRWYFYYLGTGPEASLPYGANKEGIVWVATEGALNTPKDHIGTRNPNNNAATVLQLPQGTTLPKGFYAEGSRGGSQASSRSSSRSRGNSRNSTPGSSRGNSPARMASGGGETALALLLLDRLNQLESKVSGKGQQQQGQTVTKKSAAEASKKPRQKRTATKQYNVTQAFGRRGPEQTQGNFGDQDLIRQGTDYKHWPQIAQFAPSASAFFGMSRIGMEVTPSGTWLTYHGAIKLDDKDPQFKDNVILLNKHIDAYKTFPPTEPKKDKKKKTDEAQPLPQRQKKQPTVTLLPAADMDDFSRQLQNSMSGASADSTQA

SEQ ID NO: 9965 - protein, 39 aa, SARS coronavirus
MKLLIVLTCISLCSCICTVVQRCASNKPHVLEDPCKVQH

SEQ ID NO: 9966 - protein, 98 aa, SARS coronavirus
MDPNQTNVVPPALHLVDPQIQLTITRMEDAMGQGQNSADPKVYPIILRLGSQLSLSMARRNLDSLEARAFQSTPIVVQMTKLATTEELPDEFVVVTAK

SEQ ID NO: 9967 - DNA, 29740 bp, SARS coronavirus
atattaggtttttacctacccaggaaaagccaaccaacctcgatctcttgtagatctgttctctaaacgaactttaaaatctgtgtagctgtcgctcggctgcatgcctagtgcacctacgcagtataaacaataataaattttactgtcgttgacaagaaacgagtaactcgtccctcttctgcagactgcttacggtttcgtccgtgttgcagtcgatcatcagcatacctaggtttcgtccgggtgtgaccgaaaggtaagatggagagccttgttcttggtgtcaacgagaaaacacacgtccaactcagtttgcctgtccttcaggttagagacgtgctagtgcgtggcttcggggactctgtggaagaggccctatcggaggcacgtgaacacctcaaaaatggcacttgtggtctagtagagctggaaaaaggcgtactgccccagcttgaacagccctatgtgttcattaaacgttctgatgccttaagcaccaatcacggccacaaggtcgttgagctggttgcagaaatggacggcattcagtacggtcgtagcggtataacactgggagtactcgtgccacatgtgggcgaaaccccaattgcataccgcaatgttcttcttcgtaagaacggtaataagggagccggtggtcatagctatggcatcgatctaaagtcttatgacttaggtgacgagcttggcactgatcccattgaagattatgaacaaaactggaacactaagcatggcagtggtgcactccgtgaactcactcgtgagctcaatggaggtgcagtcactcgctatgtcgacaacaatttctgtggcccagatgggtaccctcttgattgcatcaaagattttctcgcacgcgcgggcaagtcaatgtgcactctttccgaacaacttgattacatcgagtcgaagagaggtgtctactgctgccgtgaccatgagcatgaaattgcctggttcactgagcgctctgataagagctacgagcaccagacacccttcgaaattaagagtgccaagaaatttgacactttcaaaggggaatgcccaaagtttgtgtttcctcttaactcaaaagtcaaagtcattcaaccacgtgttgaaaagaaaaagactgagggtttcatggggcgtatacgctctgtgtaccctgttgcatctccacaggagtgtaacaatatgcacttgtctaccttgatgaaatgtaatcattgcgatgaagtttcatggcagacgtgcgactttctgaaagccacttgtgaacattgtggcactgaaaatttagttattgaaggacctactacatgtgggtacctacctactaatgctgtagtgaaaatgccatgtcctgcctgtcaagacccagagattggacctgagcatagtgttgcagattatcacaaccactcaaacattgaaactcgactccgcaagggaggtaggactagatgttttggaggctgtgtgtttgcctatgttggctgctataataagcgtgcctactgggttcctcgtgctagtgctgatattggctcaggccatactggcattactggtgacaatgtggagaccttgaatgaggatctccttgagatactgagtcgtgaacgtgttaacattaacattgttggcgattttcatttgaatgaagaggttgccatcattttggcatctttctctgcttctacaagtgcctttattgacactataaagagtcttgattacaagtctttcaaaaccattgttgagtcctgcggtaactataaagttaccaagggaaagcccgtaaaaggtgcttggaacattggacaacagagatcagttttaacaccactgtgtggttttccctcacaggctgctggtgttatcagatcaatttttgcgcgcacacttgatgcagcaaaccactcaattcctgatttgcaaagagcagctgtcaccatacttgatggtatttctgaacagtcattacgtcttgtcgacgccatggtttatacttcagacctgctcaccaacagtgtcattattatggcatatgtaactggtggtcttgtacaacagacttctcagtggttgtctaatcttttgggcactactgttgaaaaactcaggcctatctttgaatggattgaggcgaaacttagtgcaggagttgaatttctcaaggatgcttgggagattctcaaatttctcattacaggtgtttttgacatcgtcaagggtcaaatacaggttgcttcagataacatcaaggattgtgtaaaatgcttcattgatgttgttaacaaggcactcgaaatgtgcattgatcaagtcactatcgctggcgcaaagttgcgatcactcaacttaggtgaagtcttcatcgctcaaagcaagggactttaccgtcagtgtatacgtggcaaggagcagctgcaactactcatgcctcttaaggcaccaaaagaagtaacctttcttgaaggtgattcacatgacacagtacttacctctgaggaggttgttctcaagaacggtgaactcgaaacactcgagacgcccgttgatagcttcacaaatggagctatcgttggcacaccagtctgtgtaaatggcctcatgctcttagagattaaggacaaagaacaatactgcgcattgtctcctggtttactggctacaaacaatgtctttcgcttaaaagggggtgcaccaattaaaggtgtaacctttggagaagatactgtttgggaagttcaaggttacaagaatgtgagaatcacatttgagcttgatgaacgtgttgacaaagtgcttaatgaaaagtgctctgtctacactgttgaatccggtaccgaagttactgagtttgcatgtgttgtagcagaggctgttgtgaagactttacaaccagtttctgatctccttaccaacatgggtattgatcttgatgagtggagtgtagctacattctacttatttgatgatgctggtgaagaaaacttttcatcacgtatgtattgttccttttaccctccagatgaggaagaagaggacgatgcagagtgtgaggaagaagaaattgatgaaacctgtgaacatgagtacggtacagaggatgattatcaaggtctccctctggaatttggtgcctcagctgaaacagttcgagttgaggaagaagaagaggaagactggctggatgatactactgagcaatcagagattgagccagaaccagaacctacacctgaagaaccagttaatcagtttactggttatttaaaacttactgacaatgttgccattaaatgtgttgacatcgttaaggaggcacaaagtgctaatcctatggtgattgtaaatgctgctaacatacacctgaaacatggtggtggtgtagcaggtgcactcaacaaggcaaccaatggtgccatgcaaaaggagagtgatgattacattaagctaaatggccctcttacagtaggagggtcttgtttgctttctggacataatcttgctaagaagtgtctgcatgttgttggacctaacctaaatgcaggtgaggacatccagcttcttaaggcagcatatgaaaatttcaattcacaggacatcttacttgcaccattgttgtcagcaggcatatttggtgctaaaccacttcagtctttacaagtgtgcgtgcagacggttcgtacacaggtttatattgcagtcaatgacaaagctctttatgagcaggttgtcatggattatcttgataacctgaagcctagagtggaagcacctaaacaagaggagccaccaaacacagaagattccaaaactgaggagaaatctgtcgtacagaagcctgtcgatgtgaagccaaaaattaaggcctgcattgatgaggttaccacaacactggaagaaactaagtttcttaccaataagttactcttgtttgctgatatcaatggtaagctttaccatgattctcagaacatgcttagaggtgaagatatgtctttccttgagaaggatgcaccttacatggtaggtgatgttatcactagtggtgatatcacttgtgttgtaataccctccaaaaaggctggtggcactactgagatgctctcaagagctttgaagaaagtgccagttgatgagtatataaccacgtaccctggacaaggatgtgctggttatacacttgaggaagctaagactgctcttaagaaatgcaaatctgcattttatgtactaccttcagaagcacctaatgctaaggaagagattctaggaactgtatcctggaatttgagagaaatgcttgctcatgctgaagagacaagaaaattaatgcctatatgcatggatgttagagccataatggcaaccatccaacgtaagtataaaggaattaaaattcaagagggcatcgttgactatggtgtccgattcttcttttatactagtaaagagcctgtagcttctattattacgaagctgaactctctaaatgagccgcttgtcacaatgccaattggttatgtgacacatggttttaatcttgaagaggctgcgcgctgtatgcgttctcttaaagctcctgccgtagtgtcagtatcatcaccagatgctgttactacatataatggatacctcacttcgtcatcaaagacatctgaggagcactttgtagaaacagtttctttggctggctcttacagagattggtcctattcaggacagcgtacagagttaggtgttgaatttcttaagcgtggtgacaaaattgtgtaccacactctggagagccccgtcgagtttcatcttgacggtgaggttctttcacttgacaaactaaagagtctcttatccctgcgggaggttaagactataaaagtgttcacaactgtggacaacactaatctccacacacagcttgtggatatgtctatgacatatggacagcagtttggtccaacatacttggatggtgctgatgttacaaaaattaaacctcatgtaaatcatgagggtaagactttctttgtactacctagtgatgacacactacgtagtgaagctttcgagtactaccatactcttgatgagagttttcttggtaggtacatgtctgctttaaaccacacaaagaaatggaaatttcctcaagttggtggtttaacttcaattaaatgggctgataacaattgttatttgtctagtgttttattagcacttcaacagcttgaagtcaaattcaatgcaccagcacttcaagaggcttattatagagcccgtgctggtgatgctgctaacttttgtgcactcatactcgcttacagtaataaaactgttggcgagcttggtgatgtcagagaaactatgacccatcttctacagcatgctaatttggaatctgcaaagcgagttcttaatgtggtgtgtaaacattgtggtcagaaaactactaccttaacgggtgtagaagctgtgatgtatatgggtactctatcttatgataatcttaagacaggtgtttccattccatgtgtgtgtggtcgtgatgctacacaatatctagtacaacaagagtcttcttttgttatgatgtctgcaccacctgctgagtataaattacagcaaggtacattcttatgtgcgaatgagtacactggtaactatcagtgtggtcattacactcatataactgctaaggagaccctctatcgtattgacggagctcaccttacaaagatgtcagagtacaaaggaccagtgactgatgttttctacaaggaaacatcttacactacaaccatcaagcctgtgtcgtataaactcgatggagttacttacacagagattgaaccaaaattggatgggtattataaaaaggataatgcttactatacagagcagcctatagaccttgtaccaactcaaccattaccaaatgcgagttttgataatttcaaactcacatgttctaacacaaaatttgctgatgatttaaatcaaatgacaggcttcacaaagccagcttcacgagagctatctgtcacattcttcccagacttgaatggcgatgtagtggctattgactatagacactattcagcgagtttcaagaaaggtgctaaattactgcataagccaattgtttggcacattaaccaggctacaaccaagacaacgttcaaaccaaacacttggtgtttacgttgtctttggagtacaaagccagtagatacttcaaattcatttgaagttctggcagtagaagacacacaaggaatggacaatcttgcttgtgaaagtcaacaacccacctctgaagaagtagtggaaaatcctaccatacagaaggaagtcatagagtgtgacgtgaaaactaccgaagttgtaggcaatgtcatacttaaaccatcagatgaaggtgttaaagtaacacaagagttaggtcatgaggatcttatggctgcttatgtggaaaacacaagcattaccattaagaaacctaatgagctttcactagccttaggtttaaaaacaattgccactcatggtattgctgcaattaatagtgttccttggagtaaaattttggcttatgtcaaaccattcttaggacaagcagcaattacaacatcaaattgcgctaagagattagcacaacgtgtgtttaacaattatatgccttatgtgtttacattattgttccaattgtgtacttttactaaaagtaccaattctagaattagagcttcactacctacaactattgctaaaaatagtgttaagagtgttgctaaattatgtttggatgccggcattaattatgtgaagtcacccaaattttctaaattgttcacaatcgctatgtggctattgttgttaagtatttgcttaggttctctaatctgtgtaactgctgcttttggtgtactcttatctaattttggtgctccttcttattgtaatggcgttagagaattgtatcttaattcgtctaacgttactactatggatttctgtgaaggttcttttccttgcagcatttgtttaagtggattagactcccttgattcttatccagctcttgaaaccattcaggtgacgatttcatcgtacaagctagacttgacaattttaggtctggccgctgagtgggttttggcatatatgttgttcacaaaattcttttatttattaggtctttcagctataatgcaggtgttctttggctattttgctagtcatttcatcagcaattcttggctcatgtggtttatcattagtattgtacaaatggcacccgtttctgcaatggttaggatgtacatcttctttgcttctttctactacatatggaagagctatgttcatatcatggatggttgcacctcttcgacttgcatgatgtgctataagcgcaatcgtgccacacgcgttgagtgtacaactattgttaatggcatgaagagatctttctatgtctatgcaaatggaggccgtggcttctgcaagactcacaattggaattgtctcaattgtgacacattttgcactggtagtacattcattagtgatgaagttgctcgtgatttgtcactccagtttaaaagaccaatcaaccctactgaccagtcatcgtatattgttgatagtgttgctgtgaaaaatggcgcgcttcacctctactttgacaaggctggtcaaaagacctatgagagacatccgctctcccattttgtcaatttagacaatttgagagctaacaacactaaaggttcactgcctattaatgtcatagtttttgatggcaagtccaaatgcgacgagtctgcttctaagtctgcttctgtgtactacagtcagctgatgtgccaacctattctgttgcttgaccaagctcttgtatcagacgttggagatagtactgaagtttccgttaagatgtttgatgcttatgtcgacaccttttcagcaacttttagtgttcctatggaaaaacttaaggcacttgttgctacagctcacagcgagttagcaaagggtgtagctttagatggtgtcctttctacattcgtgtcagctgcccgacaaggtgttgttgataccgatgttgacacaaaggatgttattgaatgtctcaaactttcacatcactctgacttagaagtgacaggtgacagttgtaacaatttcatgctcacctataataaggttgaaaacatgacgcccagagatcttggcgcatgtattgactgtaatgcaaggcatatcaatgcccaagtagcaaaaagtcacaatgtttcactcatctggaatgtaaaagactacatgtctttatctgaacagctgcgtaaacaaattcgtagtgctgccaagaagaacaacataccttttagactaacttgtgctacaactagacaggttgtcaatgtcataactactaaaatctcactcaagggtggtaagattgttagtacttgttttaaacttatgcttaaggccacattattgtgcgttcttgctgcattggtttgttatatcgttatgccagtacatacattgtcaatccatgatggttacacaaatgaaatcattggttacaaagccattcaggatggtgtcactcgtgacatcatttctactgatgattgttttgcaaataaacatgctggttttgacgcatggtttagccagcgtggtggttcatacaaaaatgacaaaagctgccctgtagtagctgctatcattacaagagagattggtttcatagtgcctggcttaccgggtactgtgctgagagcaatcaatggtgacttcttgcattttctacctcgtgtttttagtgctgttggcaacatttgctacacaccttccaaactcattgagtatagtgattttgctacctctgcttgcgttcttgctgctgagtgtacaatttttaaggatgctatgggcaaacctgtgccatattgttatgacactaatttgctagagggttctatttcttatagtgagcttcgtccagacactcgttatgtgcttatggatggttccatcatacagtttcctaacacttacctggagggttctgttagagtagtaacaacttttgatgctgagtactgtagacatggtacatgcgaaaggtcagaagtaggtatttgcctatctaccagtggtagatgggttcttaataatgagcattacagagctctatcaggagttttctgtggtgttgatgcgatgaatctcatagctaacatctttactcctcttgtgcaacctgtgggtgctttagatgtgtctgcttcagtagtggctggtggtattattgccatattggtgacttgtgctgcctactactttatgaaattcagacgtgtttttggtgagtacaaccatgttgttgctgctaatgcacttttgtttttgatgtctttcactatactctgtctggtaccagcttacagctttctgccgggagtctactcagtcttttacttgtacttgacattctatttcaccaatgatgtttcattcttggctcaccttcaatggtttgccatgttttctcctattgtgcctttttggataacagcaatctatgtattctgtatttctctgaagcactgccattggttctttaacaactatcttaggaaaagagtcatgtttaatggagttacatttagtaccttcgaggaggctgctttgtgtacctttttgctcaacaaggaaatgtacctaaaattgcgtagcgagacactgttgccacttacacagtataacaggtatcttgctctatataacaagtacaagtatttcagtggagccttagatactaccagctatcgtgaagcagcttgctgccacttagcaaaggctctaaatgactttagcaactcaggtgctgatgttctctaccaaccaccacagacatcaatcacttctgctgttctgcagagtggttttaggaaaatggcattcccgtcaggcaaagttgaagggtgcatggtacaagtaacctgtggaactacaactcttaatggattgtggttggatgacacagtatactgtccaagacatgtcatttgcacagcagaagacatgcttaatcctaactatgaagatctgctcattcgcaaatccaaccatagctttcttgttcaggctggcaatgttcaacttcgtgttattggccattctatgcaaaattgtctgcttaggcttaaagttgatacttctaaccctaagacacccaagtataaatttgtccgtatccaacctggtcaaacattttcagttctagcatgctacaatggttcaccatctggtgtttatcagtgtgccatgagacctaatcataccattaaaggttctttccttaatggatcatgtggtagtgttggttttaacattgattatgattgcgtgtctttctgctatatgcatcatatggagcttccaacaggagtacacgctggtactgacttagaaggtaaattctatggtccatttgttgacagacaaactgcacaggctgcaggtacagacacaaccataacattaaatgttttggcatggctgtatgctgctgttatcaatggtgataggtggtttcttaatagattcaccactactttgaatgactttaaccttgtggcaatgaagtacaactatgaacctttgacacaagatcatgttgacatattgggacctctttctgctcaaacaggaattgccgtcttagatatgtgtgctgctttgaaagagctgctgcagaatggtatgaatggtcgtactatccttggtagcactattttagaagatgagtttacaccatttgatgttgttagacaatgctctggtgttaccttccaaggtaagttcaagaaaattgttaagggcactcatcattggatgcttttaactttcttgacatcactattgattcttgttcaaagtacacagtggtcactgtttttctttgtttacgagaatgctttcttgccatttactcttggtattatggcaattgctgcatgtgctatgctgcttgttaagcataagcacgcattcttgtgcttgtttctgttaccttctcttgcaacagttgcttactttaatatggtctacatgcctgctagctgggtgatgcgtatcatgacatggcttgaattggctgacactagcttgtctggttataggcttaaggattgtgttatgtatgcttcagctttagttttgcttattctcatgacagctcgcactgtttatgatgatgctgctagacgtgtttggacactgatgaatgtcattacacttgtttacaaagtctactatggtaatgctttagatcaagctatttccatgtgggccttagttatttctgtaacctctaactattctggtgtcgttacgactattatgtttttagctagagctatagtgtttgtgtgtgttgagtattacccattgttatttattactggcaacaccttacagtgtatcatgcttgtttattgtttcttaggctattgttgctgctgctactttggccttttctgtttactcaaccgttacttcaggcttactcttggtgtttatgactacttggtctctacacaagaatttaggtatatgaactcccaggggcttttgcctcctaagagtagtattgatgctttcaagcttaacattaagttgttgggtattggaggtaaaccatgtatcaaggttgctactgtacagtctaaaatgtctgacgtaaagtgcacatctgtggtactgctctcggttcttcaacaacttagagtagagtcatcttctaaattgtgggcacaatgtgtacaactccacaatgatattcttcttgcaaaagacacaactgaagctttcgagaagatggtttctcttttgtctgttttgctatccatgcagggtgctgtagacattaataggttgtgcgaggaaatgctcgataaccgtgctactcttcaggctattgcttcagaatttagttctttaccatcatatgccgcttatgccactgcccaggaggcctatgagcaggctgtagctaatggtgattctgaagtcgttctcaaaaagttaaagaaatctttgaatgtggctaaatctgagtttgaccgtgatgctgccatgcaacgcaagttggaaaagatggcagatcaggctatgacccaaatgtacaaacaggcaagatctgaggacaagagggcaaaagtaactagtgctatgcaaacaatgctcttcactatgcttaggaagcttgataatgatgcacttaacaacattatcaacaatgcgcgtgatggttgtgttccactcaacatcataccattgactacagcagccaaactcatggttgttgtccctgattatggtacctacaagaacacttgtgatggtaacacctttacatatgcatctgcactctgggaaatccagcaagttgttgatgcggatagcaagattgttcaacttagtgaaattaacatggacaattcaccaaatttggcttggcctcttattgttacagctctaagagccaactcagctgttaaactacagaataatgaactgagtccagtagcactacgacagatgtcctgtgcggctggtaccacacaaacagcttgtactgatgacaatgcacttgcctactataacaattcgaagggaggtaggtttgtgctggcattactatcagaccaccaagatctcaaatgggctagattccctaagagtgatggtacaggtacaatttacacagaactggaaccaccttgtaggtttgttacagacacaccaaaagggcctaaagtgaaatacttgtacttcatcaaaggcttaaacaacctaaatagaggtatggtgctgggcagtttagctgctacagtacgtcttcaggctggaaatgctacagaagtacctgccaattcaactgtgctttccttctgtgcttttgcagtagaccctgctaaagcatataaggattacctagcaagtggaggacaaccaatcaccaactgtgtgaagatgttgtgtacacacactggtacaggacaggcaattactgtaacaccagaagctaacatggaccaagagtcctttggtggtgcttcatgttgtctgtattgtagatgccacattgaccatccaaatcctaaaggattctgtgacttgaaaggtaagtacgtccaaatacctaccacttgtgctaatgacccagtgggttttacacttagaaacacagtctgtaccgtctgcggaatgtggaaaggttatggctgtagttgtgaccaactccgcgaacccttgatgcagtctgcggatgcatcaacgtttttaaacgggtttgcggtgtaagtgcagcccgtcttacaccgtgcggcacaggcactagtactgatgtcgtctacagggcttttgatatttacaacgaaaaagttgctggttttgcaaagttcctaaaaactaattgctgtcgcttccaggagaaggatgaggaaggcaatttattagactcttactttgtagttaagaggcatactatgtctaactaccaacatgaagagactatttataacttggttaaagattgtccagcggttgctgtccatgactttttcaagtttagagtagatggtgacatggtaccacatatatcacgtcagcgtctaactaaatacacaatggctgatttagtctatgctctacgtcattttgatgagggtaattgtgatacattaaaagaaatactcgtcacatacaattgctgtgatgatgattatttcaataagaaggattggtatgacttcgtagagaatcctgacatcttacgcgtatatgctaacttaggtgagcgtgtacgccaatcattattaaagactgtacaattctgcgatgctatgcgtgatgcaggcattgtaggcgtactgacattagataatcaggatcttaatgggaactggtacgatttcggtgatttcgtacaagtagcaccaggctgcggagttcctattgtggattcatattactcattgctgatgcccatcctcactttgactagggcattggctgctgagtcccatatggatgctgatctcgcaaaaccacttattaagtgggatttgctgaaatatgattttacggaagagagactttgtctcttcgaccgttattttaaatattgggaccagacataccatcccaattgtattaactgtttggatgataggtgtatccttcattgtgcaaactttaatgtgttattttctactgtgtttccacctacaagttttggaccactagtaagaaaaatatttgtagatggtgttccttttgttgtttcaactggataccattttcgtgagttaggagtcgtacataatcaggatgtaaacttacatagctcgcgtctcagtttcaaggaacttttagtgtatgctgctgatccagctatgcatgcagcttctggcaatttattgctagataaacgcactacatgcttttcagtagctgcactaacaaacaatgttgcttttcaaactgtcaaacccggtaattttaataaagacttttatgactttgctgtgtctaaaggtttctttaaggaaggaagttctgttgaactaaaacacttcttctttgctcaggatggcaacgctgctatcagtgattatgactattatcgttataatctgccaacaatgtgtgatatcagacaactcctattcgtagttgaagttgttgataaatactttgattgttacgatggtggctgtattaatgccaaccaagtaatcgttaacaatctggataaatcagctggtttcccatttaataaatggggtaaggctagactttattatgactcaatgagttatgaggatcaagatgcacttttcgcgtatactaagcgtaatgtcatccctactataactcaaatgaatcttaagtatgccattagtgcaaagaatagagctcgcaccgtagctggtgtctctatctgtagtactatgacaaatagacagtttcatcagaaattattgaagtcaatagccgccactagaggagctactgtggtaattggaacaagcaagttttacggtggctggcataatatgttaaaaactgtttacagtgatgtagaaactccacaccttatgggttgggattatccaaaatgtgacagagccatgcctaacatgcttaggataatggcctctcttgttcttgctcgcaaacataacacttgctgtaacttatcacaccgtttctacaggttagctaacgagtgtgcgcaagtattaagtgagatggtcatgtgtggcggctcactatatgttaaaccaggtggaacatcatccggtgatgctacaactgcttatgctaatagtgtctttaacatttgtcaagctgttacagccaatgtaaatgcacttctttcaactgatggtaataagatagctgacaagtatgtccgcaatctacaacacaggctctatgagtgtctctatagaaatagggatgttgatcatgaattcgtggatgagttttacgcttacctgcgtaaacatttctccatgatgattctttctgatgatgccgttgtgtgctataacagtaactatgcggctcaaggtttagtagctagcattaagaactttaaggcagttctttattatcaaaataatgtgttcatgtctgaggcaaaatgttggactgagactgaccttactaaaggacctcacgaattttgctcacagcatacaatgctagttaaacaaggagatgattacgtgtacctgccttacccagatccatcaagaatattaggcgcaggctgttttgtcgatgatattgtcaaaacagatggtacacttatgattgaaaggttcgtgtcactggctattgatgcttacccacttacaaaacatcctaatcaggagtatgctgatgtctttcacttgtatttacaatacattagaaagttacatgatgagcttactggccacatgttggacatgtattccgtaatgctaactaatgataacacctcacggtactgggaacctgagttttatgaggctatgtacacaccacatacagtcttgcaggctgtaggtgcttgtgtattgtgcaattcacagacttcacttcgttgcggtgcctgtattaggagaccattcctatgttgcaagtgctgctatgaccatgtcatttcaacatcacacaaattagtgttgtctgttaatccctatgtttgcaatgccccaggttgtgatgtcactgatgtgacacaactgtatctaggaggtatgagctattattgcaagtcacataagcctcccattagttttccattatgtgctaatggtcaggtttttggtttatacaaaaacacatgtgtaggcagtgacaatgtcactgacttcaatgcgatagcaacatgtgattggactaatgctggcgattacatacttgccaacacttgtactgagagactcaagcttttcgcagcagaaacgctcaaagccactgaggaaacatttaagctgtcatatggtattgccactgtacgcgaagtactctctgacagagaattgcatctttcatgggaggttggaaaacctagaccaccattgaacagaaactatgtctttactggttaccgtgtaactaaaaatagtaaagtacagattggagagtacacctttgaaaaaggtgactatggtgatgctgttgtgtacagaggtactacgacatacaagttgaatgttggtgattactttgtgttgacatctcacactgtaatgccacttagtgcacctactctagtgccacaagagcactatgtgagaattactggcttgtacccaacactcaacatctcagatgagttttctagcaatgttgcaaattatcaaaaggtcggcatgcaaaagtactctacactccaaggaccacctggtactggtaagagtcattttgccatcggacttgctctctattacccatctgctcgcatagtgtatacggcatgctctcatgcagctgttgatgccctatgtgaaaaggcattaaaatatttgcccatagataaatgtagtagaatcatacctgcgcgtgcgcgcgtagagtgttttgataaattcaaagtgaattcaacactagaacagtatgttttctgcactgtaaatgcattgccagaaacaactgctgacattgtagtctttgatgaaatctctatggctactaattatgacttgagtgttgtcaatgctagacttcgtgcaaaacactacgtctatattggcgatcctgctcaattaccagccccccgcacattgctgactaaaggcacactagaaccagaatattttaattcagtgtgcagacttatgaaaacaataggtccagacatgttccttggaacttgtcgccgttgtcctgctgaaattgttgacactgtgagtgctttagtttatgacaataagctaaaagcacacaaggataagtcagctcaatgcttcaaaatgttctacaaaggtgttattacacatgatgtttcatctgcaatcaacagacctcaaataggcgttgtaagagaatttcttacacgcaatcctgcttggagaaaagctgtttttatctcaccttataattcacagaacgctgtagcttcaaaaatcttaggattgcctacgcagactgttgattcatcacagggttctgaatatgactatgtcatattcacacaaactactgaaacagcacactcttgtaatgtcaaccgcttcaatgtggctatcacaagggcaaaaattggcattttgtgcataatgtctgatagagatctttatgacaaactgcaatttacaagtctagaaataccacgtcgcaatgtggctacattacaagcagaaaatgtaactggactttttaaggactgtagtaagatcattactggtcttcatcctacacaggcacctacacacctcagcgttgatataaagttcaagactgaaggattatgtgttgacataccaggcataccaaaggacatgacctaccgtagactcatctctatgatgggtttcaaaatgaattaccaagtcaatggttaccctaatatgtttatcacccgcgaagaagctattcgtcacgttcgtgcgtggattggctttgatgtagagggctgtcatgcaactagagatgctgtgggtactaacctacctctccagctaggattttctacaggtgttaacttagtagctgtaccgactggttatgttgacactgaaaataacacagaattcaccagagttaatgcaaaacctccaccaggtgaccagtttaaacatcttataccactcatgtataaaggcttgccctggaatgtagtgcgtattaagatagtacaaatgctcagtgatacactgaaaggattgtcagacagagtcgtgttcgtcctttgggcgcatggctttgagcttacatcaatgaagtactttgtcaagattggacctgaaagaacgtgttgtctgtgtgacaaacgtgcaacttgcttttctacttcatcagatacttatgcctgctggaatcattctgtgggttttgactatgtctataacccatttatgattgatgttcagcagtggggctttacgggtaaccttcagagtaaccatgaccaacattgccaggtacatggaaatgcacatgtggctagttgtgatgctatcatgactagatgtttagcagtccatgagtgctttgttaagcgcgttgattggtctgttgaataccctattataggagatgaactgagggttaattctgcttgcagaaaagtacaacacatggttgtgaagtctgcattgcttgctgataagtttccagttcttcatgacataggaaatccaaaggctatcaagtgtgtgcctcaggctgaagtagaatggaagttctacgatgctcagccatgtagtgacaaagcttacaaaatagaggaactcttctattcttatgctatacatcacgataaattcactgatggtgtttgtttgttttggaattgtaacgttgatcgttacccagccaatgcaattgtgtgtaggtttgacacaagagtcttgtcaaacttgaacttaccaggctgtgatggtggtagtttgtatgtgaataagcatgcattccacactccagctttcgataaaagtgcatttactaatttaaagcaattgcctttcttttactattctgatagtccttgtgagtctcatggcaaacaagtagtgtcggatattgattatgttccactcaaatctgctacgtgtattacacgatgcaatttaggtggtgctgtttgcagacaccatgcaaatgagtaccgacagtacttggatgcatataatatgatgatttctgctggatttagcctatggatttacaaacaatttgatacttataacctgtggaatacatttaccaggttacagagtttagaaaatgtggcttataatgttgttaataaaggacactttgatggacacgccggcgaagcacctgtttccatcattaataatgctgtttacacaaaggtagatggtattgatgtggagatctttgaaaataagacaacacttcctgttaatgttgcatttgagctttgggctaagcgtaacattaaaccagtgccagagattaagatactcaataatttgggtgttgatatcgctgctaatactgtaatctgggactacaaaagagaagccccagcacatgtatctacaataggtgtctgcacaatgactgacattgccaagaaacctactgagagtgcttgttcttcacttactgtcttgtttgatggtagagtggaaggacaggtagacctttttagaaacgcccgtaatggtgttttaataacagaaggttcagtcaaaggtctaacaccttcaaagggaccagcacaagctagcgtcaatggagtcacattaattggagaatcagtaaaaacacagtttaactactttaagaaagtagacggcattattcaacagttgcctgaaacctactttactcagagcagagacttagaggattttaagcccagatcacaaatggaaactgactttctcgagctcgctatggatgaattcatacagcgatataagctcgagggctatgccttcgaacacatcgtttatggagatttcagtcatggacaacttggcggtcttcatttaatgataggcttagccaagcgctcacaagattcaccacttaaattagaggattttatccctatggacagcacagtgaaaaattacttcataacagatgcgcaaacaggttcatcaaaatgtgtgtgttctgtgattgatcttttacttgatgactttgtcgagataataaagtcacaagatttgtcagtgatttcaaaagtggtcaaggttacaattgactatgctgaaatttcattcatgctttggtgtaaggatggacatgttgaaaccttctacccaaaactacaagcaagtcaagcgtggcaaccaggtgttgcgatgcctaacttgtacaagatgcaaagaatgcttcttgaaaagtgtgaccttcagaattatggtgaaaatgctgttataccaaaaggaataatgatgaatgtcgcaaagtatactcaactgtgtcaatacttaaatacacttactttagctgtaccctacaacatgagagttattcactttggtgctggctctgataaaggagttgcaccaggtacagctgtgctcagacaatggttgccaactggcacactacttgtcgattcagatcttaatgacttcgtctccgacgcagattctactttaattggagactgtgcaacagtacatacggctaataaatgggaccttattattagcgatatgtatgaccctaggaccaaacatgtgacaaaagagaatgactctaaagaagggtttttcacttatctgtgtggatttataaagcaaaaactagccctgggtggttctatagctgtaaagataacagagcattcttggaatgctgacctttacaagcttatgggccatttctcatggtggacagcttttgttacaaatgtaaatgcatcatcatcggaagcatttttaattggggctaactatcttggcaagccgaaggaacaaattgatggctataccatgcatgctaactacattttctggaggaacacaaatcctatccagttgtcttcctattcactctttgacatgagcaaatttcctcttaaattaagaggaactgctgtaatgtctcttaaggagaatcaaatcaatgatatgatttattctcttctggaaaaaggtaggcttatcattagagaaaacaacagagttgtggtttcaagtgatattcttgttaacaactaaacgaacatgtttattttcttattatttcttactctcactagtggtagtgaccttgaccggtgcaccacttttgatgatgttcaagctcctaattacactcaacatacttcatctatgaggggggtttactatcctgatgaaatttttagatcagacactctttatttaactcaggatttatttcttccattttattctaatgttacagggtttcatactattaatcatacgtttggcaaccctgtcataccttttaaggatggtatttattttgctgccacagagaaatcaaatgttgtccgtggttgggtttttggttctaccatgaacaacaagtcacagtcggtgattattattaacaattctactaatgttgttatacgagcatgtaactttgaattgtgtgacaaccctttctttgctgtttctaaacccatgggtacacagacacatactatgatattcgataatgcatttaattgcactttcgagtacatatctgatgccttttcgcttgatgtttcagaaaagtcaggtaattttaaacacttacgagagtttgtgtttaaaaataaagatgggtttctctatgtttataagggctatcaacctatagatgtagttcgtgatctaccttctggttttaacactttgaaacctatttttaagttgcctcttggtattaacattacaaattttagagccattcttacagccttttcacctgctcaagacatttggggcacgtcagctgcagcctattttgttggctatttaaagccaactacatttatgctcaagtatgatgaaaatggtacaatcacagatgctgttgattgttctcaaaatccacttgctgaactcaaatgctctgttaagagctttgagattgacaaaggaatttaccagacctctaatttcagggttgttccctcaggagatgttgtgagattccctaatattacaaacttgtgtccttttggagaggtttttaatgctactaaattcccttctgtctatgcatgggagagaaaaaaaatttctaattgtgttgctgattactctgtgctctacaactcaacatttttttcaacctttaagtgctatggcgtttctgccactaagttgaatgatctttgcttctccaatgtctatgcagattcttttgtagtcaagggagatgatgtaagacaaatagcgccaggacaaactggtgttattgctgattataattataaattgccagatgatttcatgggttgtgtccttgcttggaatactaggaacattgatgctacttcaactggtaattataattataaatataggtatcttagacatggcaagcttaggccctttgagagagacatatctaatgtgcctttctcccctgatggcaaaccttgcaccccacctgctcttaattgttattggccattaaatgattatggtttttacaccactactggcattggctaccaaccttacagagttgtagtactttcttttgaacttttaaatgcaccggccacggtttgtggaccaaaattatccactgaccttattaagaaccagtgtgtcaattttaattttaatggactcactggtactggtgtgttaactccttcttcaaagagatttcaaccatttcaacaatttggccgtgatgtttctgatttcactgattccgttcgagatcctaaaacatctgaaatattagacatttcaccttgctcttttgggggtgtaagtgtaattacacctggaacaaatgcttcatctgaagttgctgttctatatcaagatgttaactgcactgatgtttctacagcaattcatgcagatcaactcacaccagcttggcgcatatattctactggaaacaatgtattccagactcaagcaggctgtcttataggagctgagcatgtcgacacttcttatgagtgcgacattcctattggagctggcatttgtgctagttaccatacagtttctttattacgtagtactagccaaaaatctattgtggcttatactatgtctttaggtgctgatagttcaattgcttactctaataacaccattgctatacctactaacttttcaattagcattactacagaagtaatgcctgtttctatggctaaaacctccgtagattgtaatatgtacatctgcggagattctactgaatgtgctaatttgcttctccaatatggtagcttttgcacacaactaaatcgtgcactctcaggtattgctgctgaacaggatcgcaacacacgtgaagtgttcgctcaagtcaaacaaatgtacaaaaccccaactttgaaatattttggtggttttaatttttcacaaatattacctgaccctctaaagccaactaagaggtcttttattgaggacttgctctttaataaggtgacactcgctgatgctggcttcatgaagcaatatggcgaatgcctaggtgatattaatgctagagatctcatttgtgcgcagaagttcaatggacttacagtgttgccacctctgctcactgatgatatgattgctgcctacactgctgctctagttagtggtactgccactgctggatggacatttggtgctggcgctgctcttcaaataccttttgctatgcaaatggcatataggttcaatggcattggagttacccaaaatgttctctatgagaaccaaaaacaaatcgccaaccaatttaacaaggcgattagtcaaattcaagaatcacttacaacaacatcaactgcattgggcaagctgcaagacgttgttaaccagaatgctcaagcattaaacacacttgttaaacaacttagctctaattttggtgcaatttcaagtgtgctaaatgatatcctttcgcgacttgataaagtcgaggcggaggtacaaattgacaggttaattacaggcagacttcaaagccttcaaacctatgtaacacaacaactaatcagggctgctgaaatcagggcttctgctaatcttgctgctactaaaatgtctgagtgtgttcttggacaatcaaaaagagttgacttttgtggaaagggctaccaccttatgtccttcccacaagcagccccgcatggtgttgtcttcctacatgtcacgtatgtgccatcccaggagaggaacttcaccacagcgccagcaatttgtcatgaaggcaaagcatacttccctcgtgaaggtgtttttgtgtttaatggcacttcttggtttattacacagaggaacttcttttctccacaaataattactacagacaatacatttgtctcaggaaattgtgatgtcgttattggcatcattaacaacacagtttatgatcctctgcaacctgagcttgactcattcaaagaagagctggacaagtacttcaaaaatcatacatcaccagatgttgattttggcgacatttcaggcattaacgcttctgtcgtcaacattcaaaaagaaattgaccgcctcaatgaggtcgctaaaaatttaaatgaatcactcattgaccttcaagaattgggaaaatatgagcaatatattaaatggccttggtatgtttggctcggcttcattgctggactaattgccatcgtcatggttacaatcttgctttgttgcatgactagttgttgcagttgcctcaagggtgcatgctcttgtggttcttgctgcaagtttgatgaggatgactctgagccagttctcaagggtgtcaaattacattacacataaacgaacttatggatttgtttatgagattttttactcttggatcaattactgcacagccagtaaaaattgacaatgcttctcctgcaagtactgttcatgctacagcaacgataccgctacaagcctcactccctttcggatggcttgttattggcgttgcatttcttgctgtttttcagagcgctaccaaaataattgcgctcaataaaagatggcagctagccctttataagggcttccagttcatttgcaatttactgctgctatttgttaccatctattcacatcttttgcttgtcgctgcaggtatggaggcgcaatttttgtacctctatgccttgatatattttctacaatgcatcaacgcatgtagaattattatgagatgttggctttgttggaagtgcaaatccaagaacccattactttatgatgccaactactttgtttgctggcacacacataactatgactactgtataccatataacagtgtcacagatacaattgtcgttactgaaggtgacggcatttcaacaccaaaactcaaagaagactaccaaattggtggttattctgaggataggcactcaggtgttaaagactatgtcgttgtacatggctatttcaccgaagtttactaccagcttgagtctacacaaattactacagacactggtattgaaaatgctacattcttcatctttaacaagcttgttaaagacccaccgaatgtgcaaatacacacaatcgacggctcttcaggagttgctaatccagcaatggatccaatttatgatgagccgacgacgactactagcgtgcctttgtaagcacaagaaagtgagtacgaacttatgtactcattcgtttcggaagaaacaggtacgttaatagttaatagcgtacttctttttcttgctttcgtggtattcttgctagtcacactagccatccttactgcgcttcgattgtgtgcgtactgctgcaatattgttaacgtgagtttagtaaaaccaacggtttacgtctactcgcgtgttaaaaatctgaactcttctgaaggagttcctgatcttctggtctaaacgaactaactattattattattctgtttggaactttaacattgcttatcatggcagacaacggtactattaccgttgaggagcttaaacaactcctggaacaatggaacctagtaataggtttcctattcctagcctggattatgttactacaatttgcctattctaatcggaacaggtttttgtacataataaagcttgttttcctctggctcttgtggccagtaacacttgcttgttttgtgcttgctgttgtctacagaattaattgggtgactggcgggattgcgattgcaatggcttgtattgtaggcttgatgtggcttagctacttcgttgcttccttcaggctgtttgctcgtacccgctcaatgtggtcattcaacccagaaacaaacattcttctcaatgtgcctctccgggggacaattgtgaccagaccgctcatggaaagtgaacttgtcattggtgctgtgatcattcgtggtcacttgcgaatggccggacactccctagggcgctgtgacattaaggacctgccaaaagagatcactgtggctacatcacgaacgctttcttattacaaattaggagcgtcgcagcgtgtaggcactgattcaggttttgctgcatacaaccgctaccgtattggaaactataaattaaatacagaccacgccggtagcaacgacaatattgctttgctagtacagtaagtgacaacagatgtttcatcttgttgacttccaggttacaatagcagagatattgattatcattatgaggactttcaggattgctatttggaatcttgacgttataataagttcaatagtgagacaattatttaagcctctaactaagaagaattattcggagttagatgatgaagaacctatggagttagattatccataaaacgaacatgaaaattattctcttcctgacattgattgtatttacatcttgcgagctatatcactatcaggagtgtgttagaggtacgactgtactactaaaagaaccttgcccatcaggaacatacgagggcaattcaccatttcaccctcttgctgacaataaatttgcactaacttgcactagcacacactttgcttttgcttgtgctgacggtactcgacatacctatcagctgcgtgcaagatcagtttcaccaaaacttttcatcagacaagaggaggttcaacaagagctctactcgccactttttctcattgttgctgctctagtatttttaatactttgcttcaccattaagagaaagacagaatgaatgagctcactttaattgacttctatttgtgctttttagcctttctgctattccttgttttaataatgcttattatattttggttttcactcgaaatccaggatctagaagaaccttgtaccaaagtctaaacgaacatgaaacttctcattgttttgacttgtatttctctatgcagttgcatatgcactgtagtacagcgctgtgcatctaataaacctcatgtgcttgaagatccttgtaaggtacaacactaggggtaatacttatagcactgcttggctttgtgctctaggaaaggttttaccttttcatagatggcacactatggttcaaacatgcacacctaatgttactatcaactgtcaagatccagctggtggtgcgcttatagctaggtgttggtaccttcatgaaggtcaccaaactgctgcatttagagacgtacttgttgttttaaataaacgaacaaattaaaatgtctgataatggaccccaatcaaaccaacgtagtgccccccgcattacatttggtggacccacagattcaactgacaataaccagaatggaggacgcaatggggcaaggccaaaacagcgccgaccccaaggtttacccaataatattgcgtcttggttcacagctctcactcagcatggcaaggaggaacttagattccctcgaggccagggcgttccaatcaacaccaatagtggtccagatgaccaaattggctactaccgaagagctacccgacgagttcgtggtggtgacggcaaaatgaaagagctcagccccagatggtacttctattacctaggaactggcccagaagcttcacttccctacggcgctaacaaagaaggcatcgtatgggttgcaactgagggagccttgaatacacccaaagaccacattggcacccgcaatcctaataacaatgctgccaccgtgctacaacttcctcaaggaacaacattgccaaaaggcttctacgcagagggaagcagaggcggcagtcaagcctcttctcgctcctcatcacgtagtcgcggtaattcaagaaattcaactcctggcagcagtaggggaaattctcctgctcgaatggctagcggaggtggtgaaactgccctcgcgctattgctgctagacagattgaaccagcttgagagcaaagtttctggtaaaggccaacaacaacaaggccaaactgtcactaagaaatctgctgctgaggcatctaaaaagcctcgccaaaaacgtactgccacaaaacagtacaacgtcactcaagcatttgggagacgtggtccagaacaaacccaaggaaatttcggggaccaagacctaatcagacaaggaactgattacaaacattggccgcaaattgcacaatttgctccaagtgcctctgcattctttggaatgtcacgcattggcatggaagtcacaccttcgggaacatggctgacttatcatggagccattaaattggatgacaaagatccacaattcaaagacaacgtcatactgctgaacaagcacattgacgcatacaaaacattcccaccaacagagcctaaaaaggacaaaaagaaaaagactgatgaagctcagcctttgccgcagagacaaaagaagcagcccactgtgactcttcttcctgcggctgacatggatgatttctccagacaacttcaaaattccatgagtggagcttctgctgattcaactcaggcataaacactcatgatgaccacacaaggcagatgggctatgtaaacgttttcgcaattccgtttacgatacatagtctactcttgtgcagaatgaattctcgtaactaaacagcacaagtaggtttagttaactttaatctcacatagcaatctttaatcaatgtgtaacattagggaggacttgaaagagccaccacattttcatcgaggccacgcggagtacgatcgagggtacagtgaataatgctagggagagctgcctatatggaagagccctaatgtgtaaaattaattttagtagtgctatccccatgtgattttaatagcttcttaggagaatgacaaaaaaaaaaaaa

SEQ ID NO: 9968 - DNA, 690 bp, SARS coronavirus
ccaaaggacatgacctacgtagactcatctctatgatgggtttcaaaatgaattaccaagtcaatggttaccctaatatgtttatcacccgcgaagaagctattcgtcacgttcgtgcgtggattggctttgatgtagagggctgtcatgcaactagagatgctgtgggtactaacctacctctccagctaggattttctacaggtgttaacttagtagctgtaccgactggttatgttgacactgaaaataacacaaaattcaccagagttaatgcacaaacctccaccagtgagcagtttaaacatcttataccactcatgtataaaggcttgccctggaatgtagtgcgtattaagatagtacaaatgctcagtgatacactgaaaggattgtcagacagagtcgtgttcgtcctttgggcgcatggctttgagcttacatcaatgaagtactttgtcaagattggacctgaaagaacgtgttgtctgtgtgacaaacgtgcaacttgcttttctacttcatcagatacttatgcctgctggaatcattctgtgggttttgactatgtctataacccatttatgattgatgttcagcagtgggggctttacgggtaacctttcagagtaaccatgaccaacattgccaggtacatggaaatgcacatgtgggctagttgtgatgcta

SEQ ID NO: 9969 - protein, 11 aa, SARS coronavirus
PKDMTYVDSSL

SEQ ID NO: 9970 - protein, 28 aa, SARS coronavirus
ITKSMVTLICLSPAKKLFVTFVRGLALM

SEQ ID NO: 9971 - protein, 17 aa, SARS coronavirus
RAVMQLEMLWVLTYLSS

SEQ ID NO: 9972 - protein, 7 aa, SARS coronavirus
DFLQVLT

SEQ ID NO: 9973 - protein, 42 aa, SARS coronavirus
LYRLVMLTLKITQNSPELMHKPPPVSSLNILYHSCIKACPGM

SEQ ID NO: 9974 - protein, 4 aa, SARS coronavirus
CVLR

SEQ ID NO: 9975 - protein, 7 aa, SARS coronavirus
YKCSVIH

SEQ ID NO: 9976 - protein, 20 aa, SARS coronavirus
KDCQTESCSSFGRMALSLHQ

SEQ ID NO: 9977 - protein, 45 aa, SARS coronavirus; identical to SEQ ID NO: 6680

SEQ ID NO: 9978 - protein, 14 aa, SARS coronavirus
LMFSSGGFTGNLSE

SEQ ID NO: 9979 - protein, 17 aa, SARS coronavirus
PTLPGTWKCTCGLVVML

SEQ ID NO: 9980 - protein, 17 aa, SARS coronavirus
THLYDGFQNELPSQWLP

SEQ ID NO: 9981 - protein, 18 aa, SARS coronavirus
YVYHPRRSYSSRSCVDWL

SEQ ID NO: 9982 - protein, 7 aa, SARS coronavirus
CRGLSCN

SEQ ID NO: 9983 - protein, 5 aa, SARS coronavirus
RCCGY

SEQ ID NO: 9984 - protein, 11 aa, SARS coronavirus
PTSPARIFYRC

SEQ ID NO: 9985 - protein, 9 aa, SARS coronavirus
LSSCTDWLC

SEQ ID NO: 9986 - protein, 6 aa, SARS coronavirus
HKIHQS

SEQ ID NO: 9987 - protein, 6 aa, SARS coronavirus
CTNLHQ

SEQ ID NO: 9988 - protein, 7 aa, SARS coronavirus
TSYTTHV

SEQ ID NO: 9989 - protein, 9 aa, SARS coronavirus
RLALECSAY

SEQ ID NO: 9990 - protein, 6 aa, SARS coronavirus
DSTNAQ

SEQ ID NO: 9991 - protein, 18 aa, SARS coronavirus
YTERIVRQSRVRPLGAWL

SEQ ID NO: 9992 - protein, 12 aa, SARS coronavirus
AYINEVLCQDWT

SEQ ID NO: 9993 - protein, 6 aa, SARS coronavirus
KNVLSV

SEQ ID NO: 9994 - protein, 22 aa, SARS coronavirus
QTCNLLFYFIRYLCLLESFCGF

SEQ ID NO: 9995 - protein, 4 aa, SARS coronavirus
PIYD

SEQ ID NO: 9996 - protein, 28 aa, SARS coronavirus
CSAVGALRVTFQSNHDQHCQVHGNAHVG

SEQ ID NO: 9997 - protein, 205 aa, SARS coronavirus
KGHDLRRLISMMGFKMNYQVNGYPNMFITREEAIRHVRAWIGFDVEGCHATRDAVGTNLPLQLGFSTGVNLVAVPTGYVDTENNTKFTRVNAQTSTSEQFKHLIPLMYKGLPWNVVRIKIVQMLSDTLKGLSDRVVFVLWAHGFELTSMKYFVKIGPERTCCLCDKRATCFSTSSDTYACWNHSVGFDYVYNPFMIDVQQWGLYG

SEQ ID NO: 9998 - protein, 23 aa, SARS coronavirus
PFRVTMTNIARYMEMHMWASCDA

SEQ ID NO: 9999 - protein, 16 aa, SARS coronavirus
PTCAFPCTWQCWSWLL

SEQ ID NO: 10000 - protein, 13 aa, SARS coronavirus
KVTRKAPTAEHQS

SEQ ID NO: 10001 - protein, 21 aa, SARS coronavirus
MGYRHSQNPQNDSSRHKYLMK

SEQ ID NO: 10002 - protein, 18 aa, SARS coronavirus
KSKLHVCHTDNTFFQVQS

SEQ ID NO: 10003 - protein, 6 aa, SARS coronavirus
QSTSLM

SEQ ID NO: 10004 - protein, 21 aa, SARS coronavirus
AQSHAPKGRTRLCLTILSVYH

SEQ ID NO: 10005 - protein, 5 aa, SARS coronavirus
AFVLS

SEQ ID NO: 10006 - protein, 11 aa, SARS coronavirus
YALHSRASLYT

SEQ ID NO: 10007 - protein, 9 aa, SARS coronavirus
TAHWWRFVH

SEQ ID NO: 10008 - protein, 17 aa, SARS coronavirus
ILCYFQCQHNQSVQLLS

SEQ ID NO: 10009 - protein, 8 aa, SARS coronavirus
KILAGEVG

SEQ ID NO: 10010 - protein, 5 aa, SARS coronavirus
YPQHL

SEQ ID NO: 10011 - protein, 17 aa, SARS coronavirus
LHDSPLHQSQSTHERDE

SEQ ID NO: 10012 - protein, 4 aa, SARS coronavirus
LLRG

SEQ ID NO: 10013 - protein, 5 aa, SARS coronavirus
LGNSF

SEQ ID NO: 10014 - protein, 8 aa, SARS coronavirus
VYVGHVLW

SEQ ID NO: 10015 - protein, 54 aa, SARS coronavirus
SITTSPHVHFHVPGNVGHGYSERLPVKPPLLNINHKWVIDIVKTHRMIPAGISI

SEQ ID NO: 10016 - protein, 25 aa, SARS coronavirus
SRKASCTFVTQTTRSFRSNLDKVLH

SEQ ID NO: 10017 - protein, 15 aa, SARS coronavirus
CKLKAMRPKDEHDSV

SEQ ID NO: 10018 - protein, 60 aa, SARS coronavirus
QSFQCITEHLYYLNTHYIPGQAFIHEWYKMFKLLTGGGLCINSGEFCVIFSVNITSRYSY

SEQ ID NO: 10019 - protein, 7 aa, SARS coronavirus
VNTCRKS

SEQ ID NO: 10020 - protein, 53 aa, SARS coronavirus
VSTHSISSCMTALYIKANPRTNVTNSFFAGDKHIRVTIDLVIHFETHHRDEST

SEQ ID NO: 10021 - protein, 4 aa, SARS coronavirus
VMSF

SEQ ID NO: 10022 - protein, 25 aa, SARS coronavirus
ASQLAHMCISMYLAMLVMVTLKGYP

SEQ ID NO: 10023 - protein, 4 aa, SARS coronavirus
SPHC

SEQ ID NO: 10024 - protein, 7 aa, SARS coronavirus
TSIINGL

SEQ ID NO: 10025 - protein, 5 aa, SARS coronavirus
SKPTE

SEQ ID NO: 10026 - protein, 4 aa, SARS coronavirus
FQQA

SEQ ID NO: 10027 - protein, 99 aa, SARS coronavirus
VSDEVEKQVARLSHRQHVLSGPILTKYFIDVSSKPCAQRTNTTLSDNPFSVSLSICTILIRTTFQGKPLYMSGIRCLNCSLVEVCALTLVNFVLFSVST

SEQ ID NO: 10028 - protein, 28 aa, SARS coronavirus
PVGTATKLTPVENPSWRGRLVPTASLVA

SEQ ID NO: 10029 - protein, 12 aa, SARS coronavirus
QPSTSKPIHART

SEQ ID NO: 10030 - protein, 12 aa, SARS coronavirus
RIASSRVINILG

SEQ ID NO: 10031 - protein, 4 aa, SARS coronavirus
PLTW

SEQ ID NO: 10032 - protein, 17 aa, SARS coronavirus
FILKPIIEMSLRRSCPL

SEQ ID NO: 10033 - DNA, 302 bp, Artificial Sequence; identical to SEQ ID NO: 9927
  BNI-1 amplicon

SEQ ID NO: 10034 - protein, 100 aa, Artificial Sequence; identical to SEQ ID NO: 9928
  Inferred translation product

SEQ ID NO: 10035 - protein, 6 aa, Artificial Sequence
  Inferred translation product
TVDSSL

SEQ ID NO: 10036 - protein, 4 aa, Artificial Sequence
  Inferred translation product
WVSK

SEQ ID NO: 10037 - protein, 28 aa, Artificial Sequence
  Inferred translation product
ITKSMVTLICLSPAKKLFVTFVRGLALM

SEQ ID NO: 10038 - protein, 17 aa, Artificial Sequence
  Inferred translation product
RAVMQLEMLWVLTYLSS

SEQ ID NO: 10039 - protein, 7 aa, Artificial Sequence
  Inferred translation product
DFLQVLT

SEQ ID NO: 10040 - protein, 32 aa, Artificial Sequence; identical to SEQ ID NO: 9934
  Inferred translation product

SEQ ID NO: 10041 - protein, 17 aa, Artificial Sequence
  Inferred translation product
THLYDGFQNELPSQWLP

SEQ ID NO: 10042 - protein, 18 aa, Artificial Sequence
  Inferred translation product
YVYHPRRSYSSRSCVDWL

SEQ ID NO: 10043 - protein, 7 aa, Artificial Sequence
  Inferred translation product
CRGLSCN

SEQ ID NO: 10044 - protein, 5 aa, Artificial Sequence
  Inferred translation product
RCCGY

SEQ ID NO: 10045 - protein, 11 aa, Artificial Sequence
  Inferred translation product
PTSPARIFYRC

SEQ ID NO: 10046 - protein, 9 aa, Artificial Sequence
  Inferred translation product
LSSCTDWLC

SEQ ID NO: 10047 - protein, 6 aa, Artificial Sequence
  Inferred translation product
HRIHQS

SEQ ID NO: 10048 - protein, 6 aa, Artificial Sequence
  Inferred translation product
CKTSTR

SEQ ID NO: 10049 - protein, 4 aa, Artificial Sequence
  Inferred translation product
TSYT

SEQ ID NO: 10050 - protein, 27 aa, Artificial Sequence
  Inferred translation product
GIRCLNWSPGGGFALTLVNSVLFSVST

SEQ ID NO: 10051 - protein, 28 aa, Artificial Sequence
  Inferred translation product
PVGTATKLTPVENPSWRGRLVPTASLVA

SEQ ID NO: 10052 - protein, 12 aa, Artificial Sequence
  Inferred translation product
QPSTSKPIHART

SEQ ID NO: 10053 - protein, 12 aa, Artificial Sequence
  Inferred translation product
RIASSRVINILG

SEQ ID NO: 10054 - protein, 4 aa, Artificial Sequence
  Inferred translation product
PLTW

SEQ ID NO: 10055 - protein, 12 aa, Artificial Sequence
  Inferred translation product
FILKPIIEMSLR

SEQ ID NO: 10056 - protein, 9 aa, Artificial Sequence
  Inferred translation product
TGHLVEVLH

SEQ ID NO: 10057 - protein, 17 aa, Artificial Sequence
  Inferred translation product
ILCYFQCQHNQSVQLLS

SEQ ID NO: 10058 - protein, 8 aa, Artificial Sequence
  Inferred translation product
KILAGEVG

SEQ ID NO: 10059 - protein, 5 aa, Artificial Sequence
  Inferred translation product
YPQHL

SEQ ID NO: 10060 - protein, 17 aa, Artificial Sequence
  Inferred translation product
LHDSPLHQSQSTHERDE

SEQ ID NO: 10061 - protein, 4 aa, Artificial Sequence
  Inferred translation product
LLRG

SEQ ID NO: 10062 - protein, 5 aa, Artificial Sequence
  Inferred translation product
LGNSF

SEQ ID NO: 10063 - protein, 33 aa, Artificial Sequence; identical to SEQ ID NO: 9957
  Inferred translation product

SEQ ID NO: 10064 - protein, 7 aa, Artificial Sequence
  Inferred translation product
VNTCRKS

SEQ ID NO: 10065 - protein, 54 aa, Artificial Sequence; identical to SEQ ID NO: 9959
  Inferred translation product

SEQ ID NO: 10066 - DNA, 374 bp, SARS coronavirus
actcatgtataaaggcttgccctggaatgtagtgcgtattaagatagtacaaatgctcagtgatacactgaaaggattgtcagacagagtcgtgttcgtcctttgggcgcatggctttgagcttacatcaatgaagtactttgtcaagattggacctgaaagaacgtgttgtctgtgtgacaaacgtgcaacttgcttttctacttcatcagatacttatgcctgctggaatcattctgtgggttttgactatgtctataacccatttatgattgatgttcagcagtgggggctttacgggtaacctttcagagtaaccatgaccaacattgccaggtacatggaaatgcacatgtgggctagttgtgatgcta

SEQ ID NO: 10067 - protein, 102 aa, SARS coronavirus
PPLMYKGLPWNVVRIKIVQMLSDTLKGLSDRVVFVLWAHGFELTSMKYFVKIGPERTCCLCDKRATCFSTSSDTYACWNHSVGFDYVYNPFMIDVQQWGLYG

SEQ ID NO: 10068 - protein, 930 aa, Bovine coronavirus
LTNYELSVINARIRAKHYVYIGDPAQLPAPRVLLSKGTLEPKYFNTVTKLMCCLGPDIFLGTCYRCPKEIVDTVSALVYENKLKAKNESSSLCFKVYYKGVTTHESSSAVNMQQIYLINKFLKANPLWHKAVFISPYNSQNFAAKRVLGLQTQTVDSAQGSEYDYVIYSQTAETAHSVNVNRFNVAITRAKKGILCVMSNMQLFEALQFTTLTLDKVPQAVETRVQCSTNLFKDCSKSYSGYHPAHAPSFLAVDDKYKATGDLAVCLGIGDSAVTYSRLISLMGFKLDVTLDGYCKLFITKEEAVKRVRAWVGFDAEGAHATRDSIGTNFPLQLGFSTGIDFVVEATGLFADRDGYSFKKAVAKAPPGEQFKHLIPLMTRGQRWDVVRPRIVQMFADHLIDLSDCVVLVTWAANFELTCLRYFAKVGREISCNVCTKRATAYNSRTGYYGCWRHSVTCDYLYNPLIVDIQQWGYIGSLSSNHDLYCSVHKGAHVASSDAIMTRCLAVYDCFCNNINWNVEYPIISNELSINTSCRVLQRVMLKAAMLCNRYTLCYDIGNPKAIACVKDFDFKFYDAQPIVKSVKTLLYSFEAHKDSFKDGLCMFWNCNVDKYPPNAVVCRFDTRVLNNLNLPGCNGGSLYVNKHAFHTKPFSRAAFEHLKPMPFFYYSDTPCVYMDGMDAKQVDYVPLKSATCITRCNLGGAVCLKHAEEYREYLESYNTATTAGFTFWVYKTFDFYNLWNTFTKLQSLENVVYNLVKTGHYTGQAGEMPCAIINDKVVAKIDKEDVVIFINNTTYPTNVAVELFAKRSIRHHPELKLFRNLNIDVCWKHVIWDYARESIFCSNTYGVCMYTDLKFIDKLNVLFDGRDNGALEAFKRSNNGVYISTTKVKSLSMIKGPPRAELNGVVVDKVGDTDCVFYFAVRKEGQDVI

SEQ ID NO: 10069 - protein, 911 aa, Avian infectious bronchitis virus
LTNYELSFINGKINYQYVVYVGDPAQLPAPRTLLNGSLSPKDYNVVTNLMVCVKPDIFLAKCYRCPKEIVDTVSTLVYDGKFIANNPESRECFKVIVNNGNSDVGHESGSAYNTTQLEFVKDFVCRNKQWREAIFISPYNAMNQRAYRMLGLNVQTVDSSQGSEYDYVIFCVTADSQHALNINRFNVALTRAKRGILVVMRQRDELYSALKFTELDSETSLQGTGLFKICNKEFSGVHPAYAVTTKALAATYKVNDELAALVNVEAGSEITYKHLISLLGFKMSVNVEGCHNMFITRDEAIRNVRGWVGFDVEATHACGTNIGTNLPFQVGFSTGADFVVTPEGLVDTSIGNNFEPVNSKAPPGEQFNHLRVLFKSAKPWHVIRPRIVQMLADNLCNVSDCVVFVTWCHGLELTTLRYFVKIGKEQVCSCGSRATTFNSHTQAYACWKHCLGFDFVYNPLLVDIQQWGYSGNLQFNHDLHCNVHGHAHVASVDAIMTRCLAINNAFCQDVNWDLTYPHIANEDEVNSSCRYLQRMYLNACVDALKVNVVYDIGNPKGIKCVRRGDVNFRFYDKNPIVRNVKQFEYDYNQHKDKFADGLCMFWNCNVDCYPDNSLVCRYDTRNLSVFNLPGCNGGSLYVNKHAFYTPKFDRISFRNLKAMPFFFYDSSPCETIQVDGVAQDLVSLATKDCITKCNIGGAVCKKHAQMYAEFVTSYNAAVTAGFTFWVTNKLNPYNLWKSFSALQSIDNIAYNMYKGGHYDAIAGEMPTVITGDKVFVIDQGVEKAVFVNQTTLPTSVAFELYAKRNIRTLPNNRILKGLGVDVTNGFVIWDYANQTPLYRNTVKVCAYTDIEPNGLVVLYDDRYGDYQSFLAADNAVLVSTQCYKRYSYVEIPSNLLVQNGMPLKDGANLYV

SEQ ID NO: 10070 - protein, 927 aa, Murine hepatitis virus
LTNYELSVINSRVRAKHYVYIGDPAQLPAPRVLLNKGTLEPRYFNSVTKLMCCLGPDIFLGTCYRCPKEIVDTVSALVYNNKLKAKNDNSSMCFKVYYKGQTTHESSSAVNMQQIHLISKFLKANPSWSNAVFISPYNSQNYVAKRVLGLQTQTVDSAQGSEYDFVIYSQTAETAHSVNVNRFNVAITRAKKGILCVMSSMQLFESLNFTTLTLDKINNPRLQCTTNLFKDCSRSYVGYHPAHAPSFLAVDDKYKVGGDLAVCLNVADSAVTYSRLISLMGFKLDLTLDGYCKLFITRDEAIKRVRAWVGFDAEGAHAIRDSIGTNFPLQLGFSTGIDFVVEATGMFAERDGYVFKKAAARAPPGEQFKHLIPLMSRGQKWDVVRIRIVQMLSDHLVDLADSVVLVTWAASFELTCLRYFAKVGREVVCSVCTKRATCFNSRTGYYGCWRHSYSCDYLYNPLIVDIQQWGYTGSLTSNHDPICSVHKGAHVASSDAIMTRCLAVHDCFCKSVNWNLEYPIISNEVSVNTSCRLLQRVMFRAAMLCNRYDVCYDIGNPKGLACVKGYDFKFYDASPVVKSVKQFVYKYEAHKDQFLDGLCMFWNCNVDKYPANAVVCRFDTRVLNKLNLPGCNGGSLYVNKHAFHTSPFTRAAFENLKPMPFFYYSDTPCVYMEGMESKQVDYVPLRSATCITRCNLGGAVCLKHAEEYREYLESYNTATTAGFTFWVYKTFDFYNLWNTFTRLQSLENVVYNLVNAGHFDGRAGELPCAVIGEKVIAKIQNEDVVVFKNNTPFPTNVAVELFAKRSIRPHPELKLFRNLNIDVCWSHVLWDYAKDSVFCSSTYKVCKYTDLQCIESLNVLFDGRDNGALEAFKKCRNGVYINTTKIKSLSMIKGPQRADLNGVVVEKVGDSDVEFWFAVRKDGDDVI

SEQ ID NO: 10071 - protein, 936 aa, Artificial Sequence
  Consensus sequence
  misc_feature 1..936: Xaa is any amino acid
LTNYELSVINARIXAKHYVYIGDPAQLPAPRVLLNKGTLEPKYFNSVTKLMCCLGPDIFLGTCYRCPKEIVDTVSALVYDNKLKAKNDXSSLCFKVYYKGXXXXTTHESSSAVNMQQIHLIXKFLKANPXWXXAVFISPYNSQNFXAKRVLGLQTQTVDSAQGSEYDYVIYSQTAETAHSVNVNRFNVAITRAKKGILCVMSNMQLFESLNFTTLTLDKIXXXXXXRLQCSTNLFKDCSKSYSGYHPAHAPSFLAVDDKYKVXGDLAVCLNVADXSAVTYSRLISLMGFKLDVTLDGYCNLFITRDEAIKRVRAWVGFDVEGAHATRDSIGTNLPLQLGFSTGIDFVVEPTGLVDTRDGYXFKKVNAKAPPGEQFKHLIPLMSRGQPWDVVRPRIVQMLADHLXDLSDCVVLVTWAHGFELTCLRYFVKIGREISCCVCTKRATCFNSRTGYYACWRHSVGFDYLYNPLIVDIQQWGYSGSLSSNHDLHCSVHKGAHVASSDAIMTRCLAVHDCFCNXVNWNLEYPIISNELSVNTSCRLLQRVMLKAAMLCNRYXVCYDIGNPKGIACVKXXXFDFKFYDANPIVKSVKQFLYXYEAHKDXFXDGLCMFWNCNVDKYPXNAVVCRFDTRVLNXLNLPGCNGGSLYVNKHAFHTXPFSRAAFENLKPMPFFYYSDTPCVYMDGMDAKQVDYVPLKSATCITRCNLGGAVCLKHAEEYREYLESYNTATTAGFTFWVYKTFDFYNLWNTFTKLQSLENVVYNLVKAGHYDGXAGEMPCAIIGDKVIAKIQXEDVVVFINNTTFPTNVAVELFAKRSIRXHPELKLFRNLNIDVCWXHVIWDYAKDSIFCSNTYKVCXYTDLXXIDXLNVLFDGRDNGALEAFKKAXNGVYISTTKIKSLSMIKGPXRADLNGVVVDKVGDSDXXFWFAVRKDGNDVI

SEQ ID NO: 10072 - protein, 229 aa, SARS coronavirus
  misc_feature 206: Xaa is any amino acid
KGHDLRRLISMMGFKMNYQVNGYPNMFITREEAIRHVRAWIGFDVEGCHATRDAVGTNLPLQLGFSTGVNLVAVPTGYVDTENNTKFTRVNAQTSTSEQFKHLIPLMYKGLPWNVVRIKIVQMLSDTLKGLSDRVVFVLWAHGFELTSMKYFVKIGPERTCCLCDKRATCFSTSSDTYACWNHSVGFDYVYNPFMIDVQQWGLYGXPFRVTMTNIARYMEMHMWASCDA

SEQ ID NO: 10073 - protein, 522 aa, Artificial Sequence
  Hybrid AIBV/SARS coronavirus sequence
GTGLFKICNKEFSGVHPAYAVTTKALAATYKVNDELAALVNVEAGKGHDLRRLISMMGFKMNYQVNGYPNMFITREEAIRHVRAWIGFDVEGCHATRDAVGTNLPLQLGFSTGVNLVAVPTGYVDTENNTKFTRVNAQTSTSEQFKHLIPLMYKGLPWNVVRIKIVQMLSDTLKGLSDRVVFVLWAHGFELTSMKYFVKIGPERTCCLCDKRATCFSTSSDTYACWNHSVGFDYVYNPFMIDVQQWGLYGNLQFNHDLHCNVHGHAHVASVDAIMTRCLAINNAFCQDVNWDLTYPHIANEDEVNSSCRYLQRMYLNACVDALKVNVVYDIGNPKGIKCVRRGDVNFRFYDKNPIVRNVKQFEYDYNQHKDKFADGLCMFWNCNVDCYPDNSLVCRYDTRNLSVFNLPGCNGGSLYVNKHAFYTPKFDRISFRNLKAMPFFFYDSSPCETIQVDGVAQDLVSLATKDCITKCNIGGAVCKKHAQMYAEFVTSYNAAVTAGFTFWVTNKLNPYNLWKSFSALQ

SEQ ID NO: 10074 - protein, 521 aa, Hybrid BCoV/SARS coronavirus sequence
CSTNLFKDCSKSYSGYHPAHAPSFLAVDDKYKATGDLAVCLGIGDKGHDLRRLISMMGFKMNYQVNGYPNMFITREEAIRHVRAWIGFDVEGCHATRDAVGTNLPLQLGFSTGVNLVAVPTGYVDTENNTKFTRVNAQTSTSEQFKHLIPLMYKGLPWNVVRIKIVQMLSDTLKGLSDRVVFVLWAHGFELTSMKYFVKIGPERTCCLCDKRATCFSTSSDTYACWNHSVGFDYVYNPFMIDVQQWGLYGSLSSNHDLYCSVHKGAHVASSDAIMTRCLAVYDCFCNNINWNVEYPIISNELSINTSCRVLQRVMLKAAMLCNRYTLCYDIGNPKAIACVKDFDFKFYDAQPIVKSVKTLLYSFEAHKDSFKDGLCMFWNCNVDKYPPNAVVCRFDTRVLNNLNLPGCNGGSLYVNKHAFHTKPFSRAAFEHLKPMPFFYYSDTPCVYMDGMDAKQVDYVPLKSATCITRCNLGGAVCLKHAEEYREYLESYNTATTAGFTFWVYKTFDFYNLWNTFTKLQ

SEQ ID NO: 10075 - protein, 521 aa, Hybrid MHV/SARS coronavirus sequence
CTTNLFKDCSRSYVGYHPAHAPSFLAVDDKYKVGGDLAVCLNVADKGHDLRRLISMMGFKMNYQVNGYPNMFITREEAIRHVRAWIGFDVEGCHATRDAVGTNLPLQLGFSTGVNLVAVPTGYVDTENNTKFTRVNAQTSTSEQFKHLIPLMYKGLPWNVVRIKIVQMLSDTLKGLSDRVVFVLWAHGFELTSMKYFVKIGPERTCCLCDKRATCFSTSSDTYACWNHSVGFDYVYNPFMIDVQQWGLYGSLTSNHDPICSVHKGAHVASSDAIMTRCLAVHDCFCKSVNWNLEYPIISNEVSVNTSCRLLQRVMFRAAMLCNRYDVCYDIGNPKGLACVKGYDFKFYDASPVVKSVKQFVYKYEAHKDQFLDGLCMFWNCNVDKYPANAVVCRFDTRVLNKLNLPGCNGGSLYVNKHAFHTSPFTRAAFENLKPMPFFYYSDTPCVYMEGMESKQVDYVPLRSATCITRCNLGGAVCLKHAEEYREYLESYNTATTAGFTFWVYKTFDFYNLWNTFTRLQ

SEQ ID NO: 10076 - protein, 520 aa, Hybrid consensus/SARS coronavirus sequence
CSTNLFKDCSKSYSGYHPAHAPSFLAVDDKYKVGGDLAVCLNVADKGHDLRRLISMMGFKMNYQVNGYPNMFITREEAIRHVRAWIGFDVEGCHATRDAVGTNLPLQLGFSTGVNLVAVPTGYVDTENNTKFTRVNAQTSTSEQFKHLIPLMYKGLPWNVVRIKIVQMLSDTLKGLSDRVVFVLWAHGFELTSMKYFVKIGPERTCCLCDKRATCFSTSSDTYACWNHSVGFDYVYNPFMIDVQQWGLYGSLSSNHDLHCSVHKGAHVASSDAIMTRCLAVHDCFCNSVNWNLEYPIISNELSVNTSCRLLQRVMLKAAMLCNRYTVCYDIGNPKGIACVKDFDFKFYDANPIVKSVKQFLYSYEAHKDSFKDGLCMFWNCNVDKYPANAVVCRFDTRVLNLNLPGCNGGSLYVNKHAFHTKPFSRAAFENLKPMPFFYYSDTPCVYMDGMDAKQVDYVPLKSATCITRCNLGGAVCLKHAEEYREYLESYNTATTAGFTFWVYKTFDFYNLWNTFTKLQ

SEQ ID NO: 10077 - protein, 524 aa, Consensus hybrid sequence
  misc_feature 1..524: Xaa is any amino acid
CSTNLFKDCSKSYSGYHPAHAPSFLAVDDKYKVGGDLAVCLNVADXKGHDLRRLISMMGFKMNYQVNGYPNMFITREEAIRHVRAWIGFDVEGCHATRDAVGTNLPLQLGFSTGVNLVAVPTGYVDTENNTKFTRVNAQTSTSEQFKHLIPLMYKGLPWNVVRIKIVQMLSDTLKGLSDRVVFVLWAHGFELTSMKYFVKIGPERTCCLCDKRATCFSTSSDTYACWNHSVGFDYVYNPFMIDVQQWGLYGSLSSNHDLHCSVHKGAHVASSDAIMTRCLAVHDCFCNSVNWNLEYPIISNELSVNTSCRLLQRVMLKAAMLCNRYTVCYDIGNPKGIACVKXXDFDFKFYDANPIVKSVKQFLYSYEAHKDSFKDGLCMFWNCNVDKYPANAVVCRFDTRVLNXLNLPGCNGGSLYVNKHAFHTKPFSRAAFENLKPMPFFYYSDTPCVYMDGMDAKQVDYVPLKSATCITRCNLGGAVCLKHAEEYREYLESYNTATTAGFTFWVYKTFDFYNLWNTFTKLQ

SEQ ID NO: 10078 - protein, 54 aa, Artificial Sequence; identical to SEQ ID NO: 9959
  Inferred translation product

SEQ ID NO: 10079 - protein, 6 aa, SARS coronavirus
PKDMTY

SEQ ID NO: 10080 - DNA, 336 bp, SARS coronavirus
tagtcaaaacccacagaatgattccagcaggcataagtatctgatgaagtagaaaagcaagttgcacgtttgtcacacagacaacacgttctttcaggtccaatcttgacaaagtacttcattgatgtaagctcaaagccatgcgcccaaaggacgaacacgactctgtctgacaatcctttcagtgtatcactgagcatttgtactatcttaatacgcactacattccagggcaagcctttatacatgagtggtataagatgtttaaactgctcactggtggaggtttgtgcattaactctggtgaattttgtgttattttcagtgtcaacataa

SEQ ID NO: 10081 - protein, 88 aa, SARS coronavirus
MSHRQHVLSGPILTKYFIDVSSKPCAQRTNTTLSDNPFSVSLSICTILIRTTFQGKPLYMSGIRCLNCSLVEVCALTLVNFVLFSVST

SEQ ID NO: 10082 - protein, 76 aa, SARS coronavirus
MTKYFIDVSSKPCAQRTNTTLSDNPFSVSLSICTILIRTTFQGKPLYMSGIRCLNCSLVEVCALTLVNFVLFSVST

SEQ ID NO: 10083 - protein, 29 aa, SARS coronavirus
MSGIRCLNCSLVEVCALTLVNFVLFSVST

SEQ ID NO: 10084 - DNA, 1463 bp, SARS coronavirus
cctaggcatacccaaaggacatgacctaccgtagactcatctctatgatgggtttcaaaatgaattaccaagtcaatggttaccctaatatgtttatcacccgcgaagaagctattcgtcacgttcgtgcgtggattggctttgatgtagagggctgtcatgcaactagagatgctgtgggtactaacctacctctccagctaggattttctacaggtgttaacttagtagctgtaccgactggttatgttgacactgaaaataacacagaattcaccagagttaatgcaaaacctccaccaggtgaccagtttaaacatcttataccactcatgtataaaggcttgccctggaatgtagtgcgtattaagatagtacaaatgctcagtgatacactgaaaggattgtcagacagagtcgtgttcgtcctttgggcgcatggctttgagcttacatcaatgaagtactttgtcaagattggacctgaaagaacgtgttgtctgtgtgacaaacgtgcaacttgcttttctacttcatcagatacttatgcctgctggaatcattctgtgggttttgactatgtctataacccatttatgattgatgttcagcagtggggctttacgggtaaccttcagagtaaccatgaccaacattgccaggtacatggaaatgcacatgtggctagttgtgatgctatcatgactagatgtttagcagtccatgagtgctttgttaagcgcgttgattggtctgttgaataccctattataggagatgaactgagggttaattctgcttgcagaaaagtacaacacatggttgtgaagtctgcattgcttgctgataagtttccagttcttcatgacataggaaatccaaaggctatcaagtgtgtgcctcaggctgaagtagaatggaagttctacgatgctcagccatgtagtgacaaagcttacaaaatagaggaactcttctattcttatgctatacatcacgataaattcactgatggtgtttgtttgttttggaattgtaacgttgatcgttacccagccaatgcaattgtgtgtaggtttgacacaagagtcttgtcaaacttgaacttaccaggctgtgatggtggtagtttgtatgtgaataagcatgcattccacactccagctttcgataaaagtgcatttactaatttaaagcaattgcctttcttttactattctgatagtccttgtgagtctcatggcaaacaagtagtgtcggatattgattatgttccactcaaatctgctacgtgtattacacgatgcaatttaggtggtgctgtttgcagacaccatgcaaatgagtaccgacagtacttggatgcatataatatgatgatttctgctggatttagcctatggatttacaaacaatttgatacttataacctgtggaatacatttaccaggttacagagttta

SEQ ID NO: 10085 - protein, 7 aa, Artificial Sequence
  Inferred translation product
PRHTQRT

SEQ ID NO: 10086 - protein, 7 aa, Artificial Sequence
  Inferred translation product
PTVDSSL

SEQ ID NO: 10087 - protein, 4 aa, Artificial Sequence
  Inferred translation product
WVSK

SEQ ID NO: 10088 - protein, 28 aa, Artificial Sequence
  Inferred translation product
ITKSMVTLICLSPAKKLFVTFVRGLALM

SEQ ID NO: 10089 - protein, 17 aa, Artificial Sequence
  Inferred translation product
RAVMQLEMLWVLTYLSS

SEQ ID NO: 10090 - protein, 7 aa, Artificial Sequence
  Inferred translation product
DFLQVLT

SEQ ID NO: 10091 - protein, 42 aa, Artificial Sequence; identical to SEQ ID NO: 6676
  Inferred translation product

SEQ ID NO: 10092 - protein, 4 aa, Artificial Sequence
  Inferred translation product
CVLR

SEQ ID NO: 10093 - protein, 7 aa, Artificial Sequence
  Inferred translation product
YKCSVIH

SEQ ID NO: 10094 - protein, 20 aa, Artificial Sequence
  Inferred translation product
KDCQTESCSSFGRMALSLHQ

SEQ ID NO: 10095 - protein, 45 aa, Artificial Sequence; identical to SEQ ID NO: 6680
  Inferred translation product

SEQ ID NO: 10096 - protein, 34 aa, Artificial Sequence; identical to SEQ ID NO: 6681
  Inferred translation product

SEQ ID NO: 10097 - protein, 18 aa, Artificial Sequence
  Inferred translation product
QSMSALLSALIGLLNTLL

SEQ ID NO: 10098 - protein, 13 aa, Artificial Sequence
  Inferred translation product
GLILLAEKYNTWL

SEQ ID NO: 10099 - protein, 14 aa, Artificial Sequence
  Inferred translation product
SLHCLLISFQFFMT

SEQ ID NO: 10100 - protein, 13 aa, Artificial Sequence
  Inferred translation product
EIQRLSSVCLRLK

SEQ ID NO: 10101 - protein, 16 aa, Artificial Sequence
  Inferred translation product
NGSSTMLSHVVTKLTK

SEQ ID NO: 10102 - protein, 45 aa, Artificial Sequence
  Inferred translation product
RNSSILMLYITINSLMVFVCFGIVTLIVTQPMQLCVGLTQESCQT

SEQ ID NO: 10103 - protein, 11 aa, Artificial Sequence
  Inferred translation product
TYQAVMVVVCM

SEQ ID NO: 10104 - protein, 17 aa, Artificial Sequence
  Inferred translation product
ISMHSTLQLSIKVHLLI

SEQ ID NO: 10105 - protein, 19 aa, Artificial Sequence
  Inferred translation product
SNCLSFTILIVLVSLMANK

SEQ ID NO: 10106 - protein, 19 aa, Artificial Sequence
  Inferred translation product
CRILIMFHSNLLRVLHDAI

SEQ ID NO: 10107 - protein, 20 aa, Artificial Sequence
  Inferred translation product
VVLFADTMQMSTDSTWMHII

SEQ ID NO: 10108 - protein, 27 aa, Artificial Sequence
  Inferred translation product
FLLDLAYGFTNNLILITCGIHLPGYRV

SEQ ID NO: 10109 - protein, 10 aa, Artificial Sequence
  Inferred translation product
LGIPKGHDLP

SEQ ID NO: 10110 - protein, 17 aa, Artificial Sequence
  Inferred translation product
THLYDGFQNELPSQWLP

SEQ ID NO: 10111 - protein, 18 aa, Artificial Sequence
  Inferred translation product
YVYHPRRSYSSRSCVDWL

SEQ ID NO: 10112 - protein, 7 aa, Artificial Sequence
  Inferred translation product
CRGLSCN

SEQ ID NO: 10113 - protein, 5 aa, Artificial Sequence
  Inferred translation product
RCCGY

SEQ ID NO: 10114 - protein, 11 aa, Artificial Sequence
  Inferred translation product
PTSPARIFYRC

SEQ ID NO: 10115 - protein, 9 aa, Artificial Sequence
  Inferred translation product
LSSCTDWLC

SEQ ID NO: 10116 - protein, 6 aa, Artificial Sequence
  Inferred translation product
HRIHQS

SEQ ID NO: 10117 - protein, 6 aa, Artificial Sequence
  Inferred translation product
CKTSTR

SEQ ID NO: 10118 - protein, 7 aa, Artificial Sequence
  Inferred translation product
TSYTTHV

SEQ ID NO: 10119 - protein, 9 aa, Artificial Sequence
  Inferred translation product
RLALECSAY

SEQ ID NO: 10120 - protein, 6 aa, Artificial Sequence
  Inferred translation product
DSTNAQ

SEQ ID NO: 10121 - protein, 18 aa, Artificial Sequence
  Inferred translation product
YTERIVRQSRVRPLGAWL

SEQ ID NO: 10122 - protein, 12 aa, Artificial Sequence
  Inferred translation product
AYINEVLCQDWT

SEQ ID NO: 10123 - protein, 6 aa, Artificial Sequence
  Inferred translation product
KNVLSV

SEQ ID NO: 10124 - protein, 22 aa, Artificial Sequence
  Inferred translation product
QTCNLLFYFIRYLCLLESFCGF

SEQ ID NO: 10125 - protein, 4 aa, Artificial Sequence
  Inferred translation product
PIYD

SEQ ID NO: 10126 - protein, 8 aa, Artificial Sequence
  Inferred translation product
CSAVGLYG

SEQ ID NO: 10127 - protein, 12 aa, Artificial Sequence
  Inferred translation product
PTLPGTWKCTCG

SEQ ID NO: 10128 - protein, 4 aa, Artificial Sequence
  Inferred translation product
CYHD

SEQ ID NO: 10129 - protein, 5 aa, Artificial Sequence
  Inferred translation product
MFSSP

SEQ ID NO: 10130 - protein, 6 aa, Artificial Sequence
  Inferred translation product
IPYYRR

SEQ ID NO: 10131 - protein, 17 aa, Artificial Sequence
  Inferred translation product
FCLQKSTTHGCEVCIAC

SEQ ID NO: 10132 - protein, 5 aa, Artificial Sequence
  Inferred translation product
VSSSS

SEQ ID NO: 10133 - protein, 13 aa, Artificial Sequence
  Inferred translation product
HRKSKGYQVCASG

SEQ ID NO: 10134 - protein, 11 aa, Artificial Sequence
  Inferred translation product
SRMEVLRCSAM

SEQ ID NO: 10135 - protein, 17 aa, Artificial Sequence
  Inferred translation product
QSLQNRGTLLFLCYTSR

SEQ ID NO: 10136 - protein, 8 aa, Artificial Sequence
  Inferred translation product
WCLFVLEL

SEQ ID NO: 10137 - protein, 9 aa, Artificial Sequence
  Inferred translation product
SLPSQCNCV

SEQ ID NO: 10138 - protein, 12 aa, Artificial Sequence
  Inferred translation product
HKSLVKLELTRL

SEQ ID NO: 10139 - protein, 4 aa, Artificial Sequence
  Inferred translation product
FVCE

SEQ ID NO: 10140 - protein, 9 aa, Artificial Sequence
  Inferred translation product
ACIPHSSFR

SEQ ID NO: 10141 - protein, 4 aa, Artificial Sequence
  Inferred translation product
KCIY

SEQ ID NO: 10142 - protein, 10 aa, Artificial Sequence
  Inferred translation product
FKAIAFLLLF

SEQ ID NO: 10143 - protein, 10 aa, Artificial Sequence
  Inferred translation product
VSWQTSSVGY

SEQ ID NO: 10144 - protein, 25 aa, Artificial Sequence
  Inferred translation product
LCSTQICYVYYTMQFRWCCLQTPCK

SEQ ID NO: 10145 - protein, 8 aa, Artificial Sequence
  Inferred translation product
VPTVLGCI

SEQ ID NO: 10146 - protein, 7 aa, Artificial Sequence
  Inferred translation product
YDDFCWI

SEQ ID NO: 10147 - protein, 7 aa, Artificial Sequence
  Inferred translation product
PMDLQTI

SEQ ID NO: 10148 - protein, 11 aa, Artificial Sequence
  Inferred translation product
PVEYIYQVTEF

SEQ ID NO: 10149 - protein, 486 aa, Artificial Sequence
  Inferred translation product
AYPKDMTYRRLISMMGFKMNYQVNGYPNMFITREEAIRHVRAWIGFDVEGCHATRDAVGTNLPLQLGFSTGVNLVAVPTGYVDTENNTEFTRVNAKPPPGDQFKHLIPLMYKGLPWNVVRIKIVQMLSDTLKGLSDRVVFVLWAHGFELTSMKYFVKIGPERTCCLCDKRATCFSTSSDTYACWNHSVGFDYVYNPFMIDVQQWGFTGNLQSNHDQHCQVHGNAHVASCDAIMTRCLAVHECFVKRVDWSVEYPIIGDELRVNSACRKVQHMVVKSALLADKFPVLHDIGNPKAIKCVPQAEVEWKFYDAQPCSDKAYKIEELFYSYAIHHDKFTDGVCLFWNCNVDRYPANAIVCRFDTRVLSNLNLPGCDGGSLYVNKHAFHTPAFDKSAFTNLKQLPFFYYSDSPCESHGKQVVSDIDYVPLKSATCITRCNLGGAVCRHHANEYRQYLDAYNMMISAGFSLWIYKQFDTYNLWNTFTRLQSL

SEQ ID NO: 10150 - protein, 17 aa, Artificial Sequence
  Inferred translation product
PGKCIPQVISIKLFVNP

SEQ ID NO: 10151 - protein, 28 aa, Artificial Sequence
  Inferred translation product
AKSSRNHHIICIQVLSVLICMVSANSTT

SEQ ID NO: 10152 - protein, 39 aa, Artificial Sequence
  Inferred translation product
IASCNTRSRFEWNIINIRHYLFAMRLTRTIRIVKERQLL

SEQ ID NO: 10153 - protein, 27 aa, Artificial Sequence
  Inferred translation product
ISKCTFIESWSVECMLIHIQTTTITAW

SEQ ID NO: 10154 - protein, 126 aa, Artificial Sequence
  Inferred translation product
QDSCVKPTHNCIGWVTINVTIPKQTNTISEFIVMYSIRIEEFLYFVSFVTTWLSIVELPFYFSLRHTLDSLWISYVMKNWKLISKQCRLHNHVLYFSASRINPQFISYNRVFNRPINALNKALMDC

SEQ ID NO: 10155 - protein, 58 aa, Artificial Sequence
  Inferred translation product
TSSHDSITTSHMCISMYLAMLVMVTLKVTRKAPLLNINHKWVIDIVKTHRMIPAGISI

SEQ ID NO: 10156 - protein, 25 aa, Artificial Sequence
  Inferred translation product
SRKASCTFVTQTTRSFRSNLDKVLH

SEQ ID NO: 10157 - protein, 15 aa, Artificial Sequence
  Inferred translation product
CKLKAMRPKDEHDSV

SEQ ID NO: 10158 - protein, 60 aa, Artificial Sequence
  Inferred translation product
QSFQCITEHLYYLNTHYIPGQAFIHEWYKMFKLVTWWRFCINSGEFCVIFSVNITSRYSY

SEQ ID NO: 10159 - protein, 7 aa, Artificial Sequence
  Inferred translation product
VNTCRKS

SEQ ID NO: 10160 - protein, 62 aa, Artificial Sequence
  Inferred translation product
VSTHSISSCMTALYIKANPRTNVTNSFFAGDKHIRVTIDLVIHFETHHRDESTVGHVLWVCL

SEQ ID NO: 10161 - protein, 12 aa, Artificial Sequence
  Inferred translation product
KLCNLVNVFHRL

SEQ ID NO: 10162 - protein, 5 aa, Artificial Sequence
  Inferred translation product
VSNCL

SEQ ID NO: 10163 - protein, 45 aa, Artificial Sequence
  Inferred translation product
IHRLNPAEIIILYASKYCRYSFAWCLQTAPPKLHRVIHVADLSGT

SEQ ID NO: 10164 - protein, 9 aa, Artificial Sequence
  Inferred translation product
SISDTTCLP

SEQ ID NO: 10165 - protein, 7 aa, Artificial Sequence
  Inferred translation product
DSQGLSE

SEQ ID NO: 10166 - protein, 68 aa, Artificial Sequence
  Inferred translation product
KKGNCFKLVNALLSKAGVWNACLFTYKLPPSQPGKFKFDKTLVSNLHTIALRSTLQFQNKQTPSVNLS

SEQ ID NO: 10167 - protein, 6 aa, Artificial Sequence
  Inferred translation product
KSSSIL

SEQ ID NO: 10168 - protein, 6 aa, Artificial Sequence
  Inferred translation product
ALSLHG

SEQ ID NO: 10169 - protein, 7 aa, Artificial Sequence
  Inferred translation product
NFHSTSA

SEQ ID NO: 10170 - protein, 12 aa, Artificial Sequence
  Inferred translation product
GTHLIAFGFPMS

SEQ ID NO: 10171 - protein, 75 aa, Artificial Sequence
  Inferred translation product
RTGNLSASNADFTTMCCTFLQAELTLSSSPIIGYSTDQSTRLTKHSWTAKHLVMIASQLATCAFPCTWQCWSWLL

SEQ ID NO: 10172 - protein, 8 aa, Artificial Sequence
  Inferred translation product
RLPVKPHC

SEQ ID NO: 10173 - protein, 7 aa, Artificial Sequence
  Inferred translation product
TSIINGL

SEQ ID NO: 10174 - protein, 5 aa, Artificial Sequence
  Inferred translation product
SKPTE

SEQ ID NO: 10175 - protein, 4 aa, Artificial Sequence
  Inferred translation product
FQQA

SEQ ID NO: 10176 - protein, 99 aa, Artificial Sequence
  Inferred translation product
VSDEVEKQVARLSHRQHVLSGPILTKYFIDVSSKPCAQRTNTTLSDNPFSVSLSICTILIRTTFQGKPLYMSGIRCLNWSPGGGFALTLVNSVLFSVST

SEQ ID NO: 10177 - protein, 28 aa, Artificial Sequence
  Inferred translation product
PVGTATKLTPVENPSWRGRLVPTASLVA

SEQ ID NO: 10178 - protein, 12 aa, Artificial Sequence
  Inferred translation product
QPSTSKPIHART

SEQ ID NO: 10179 - protein, 12 aa, Artificial Sequence
  Inferred translation product
RIASSRVINILG

SEQ ID NO: 10180 - protein, 4 aa, Artificial Sequence
  Inferred translation product
PLTW

SEQ ID NO: 10181 - protein, 12 aa, Artificial Sequence
  Inferred translation product
FILKPIIEMSLR

SEQ ID NO: 10182 - protein, 7 aa, Artificial Sequence
  Inferred translation product
VMSFGYA

SEQ ID NO: 10183 - protein, 5 aa, Artificial Sequence
  Inferred translation product
NSVTW

SEQ ID NO: 10184 - protein, 16 aa, Artificial Sequence
  Inferred translation product
MYSTGYKYQIVCKSIG

SEQ ID NO: 10185 - protein, 31 aa, Artificial Sequence
  Inferred translation product
IQQKSSYYMHPSTVGTHLHGVCKQHHLNCIV

SEQ ID NO: 10186 - protein, 30 aa, Artificial Sequence
  Inferred translation product
VEHNQYPTLLVCHETHKDYQNSKRKAIALN

SEQ ID NO: 10187 - protein, 58 aa, Artificial Sequence
  Inferred translation product
MHFYRKLECGMHAYSHTNYHHHSLVSSSLTRLLCQTYTQLHWLGNDQRYNSKTNKHHQ

SEQ ID NO: 10188 - protein, 5 aa, Artificial Sequence
  Inferred translation product
IYRDV

SEQ ID NO: 10189 - protein, 32 aa, Artificial Sequence
  Inferred translation product
HKNRRVPLFCKLCHYMAEHRRTSILLQPEAHT

SEQ ID NO: 10190 - protein, 31 aa, Artificial Sequence
  Inferred translation product
PLDFLCHEELETYQQAMQTSQPCVVLFCKQN

SEQ ID NO: 10191 - protein, 6 aa, Artificial Sequence
  Inferred translation product
PSVHLL

SEQ ID NO: 10192 - protein, 9 aa, Artificial Sequence
  Inferred translation product
GIQQTNQRA

SEQ ID NO: 10193 - protein, 9 aa, Artificial Sequence
  Inferred translation product
QSTHGLLNI

SEQ ID NO: 10194 - protein, 20 aa, Artificial Sequence
  Inferred translation product
PHVHFHVPGNVGHGYSEGYP

SEQ ID NO: 10195 - protein, 8 aa, Artificial Sequence
  Inferred translation product
SPTAEHQS

SEQ ID NO: 10196 - protein, 21 aa, Artificial Sequence
  Inferred translation product
MGYRHSQNPQNDSSRHKYLMK

SEQ ID NO: 10197 - protein, 18 aa, Artificial Sequence
  Inferred translation product
KSKLHVCHTDNTFFQVQS

SEQ ID NO: 10198 - protein, 6 aa, Artificial Sequence
  Inferred translation product
QSTSLM

SEQ ID NO: 10199 - protein, 21 aa, Artificial Sequence
  Inferred translation product
AQSHAPKGRTRLCLTILSVYH

SEQ ID NO: 10200 - protein, 5 aa, Artificial Sequence
  Inferred translation product
AFVLS

SEQ ID NO: 10201 - protein, 11 aa, Artificial Sequence
  Inferred translation product
YALHSRASLYT

SEQ ID NO: 10202 - protein, 9 aa, Artificial Sequence
  Inferred translation product
TGHLVEVLH

SEQ ID NO: 10203 - protein, 17 aa, Artificial Sequence
  Inferred translation product
ILCYFQCQHNQSVQLLS

SEQ ID NO: 10204 - protein, 8 aa, Artificial Sequence
  Inferred translation product
KILAGEVG

SEQ ID NO: 10205 - protein, 5 aa, Artificial Sequence
  Inferred translation product
YPQHL

SEQ ID NO: 10206 - protein, 17 aa, Artificial Sequence
  Inferred translation product
LHDSPLHQSQSTHERDE

SEQ ID NO: 10207 - protein, 4 aa, Artificial Sequence
  Inferred translation product
LLRG

SEQ ID NO: 10208 - protein, 5 aa, Artificial Sequence
  Inferred translation product
LGNSF

SEQ ID NO: 10209 - protein, 12 aa, Artificial Sequence
  Inferred translation product
VYGRSCPLGMPR

SEQ ID NO: 10210 - protein, 481 aa, SARS coronavirus
MTYRRLISMMGFKMNYQVNGYPNMFITREEAIRHVRAWIGFDVEGCHATRDAVGTNLPLQLGFSTGVNLVAVPTGYVDTENNTEFTRVNAKPPPGDQFKHLIPLMYKGLPWNVVRIKIVQMLSDTLKGLSDRVVFVLWAHGFELTSMKYFVKIGPERTCCLCDKRATCFSTSSDTYACWNHSVGFDYVYNPFMIDVQQWGFTGNLQSNHDQHCQVHGNAHVASCDAIMTRCLAVHECFVKRVDWSVEYPIIGDELRVNSACRKVQHMVVKSALLADKFPVLHDIGNPKAIKCVPQAEVEWKFYDAQPCSDKAYKIEELFYSYAIHHDKFTDGVCLFWNCNVDRYPANAIVCRFDTRVLSNLNLPGCDGGSLYVNKHAFHTPAFDKSAFTNLKQLPFFYYSDSPCESHGKQVVSDIDYVPLKSATCITRCNLGGAVCRHHANEYRQYLDAYNMMISAGFSLWIYKQFDTYNLWNTFTRLQSL

SEQ ID NO: 10211 - protein, 468 aa, SARS coronavirus
MNYQVNGYPNMFITREEAIRHVRAWIGFDVEGCHATRDAVGTNLPLQLGFSTGVNLVAVPTGYVDTENNTEFTRVNAKPPPGDQFKHLIPLMYKGLPWNVVRIKIVQMLSDTLKGLSDRVVFVLWAHGFELTSMKYFVKIGPERTCCLCDKRATCFSTSSDTYACWNHSVGFDYVYNPFMIDVQQWGFTGNLQSNHDQHCQVHGNAHVASCDAIMTRCLAVHECFVKRVDWSVEYPIIGDELRVNSACRKVQHMVVKSALLADKFPVLHDIGNPKAIKCVPQAEVEWKFYDAQPCSDKAYKIEELFYSYAIHHDKFTDGVCLFWNCNVDRYPANAIVCRFDTRVLSNLNLPGCDGGSLYVNKHAFHTPAFDKSAFTNLKQLPFFYYSDSPCESHGKQVVSDIDYVPLKSATCITRCNLGGAVCRHHANEYRQYLDAYNMMISAGFSLWIYKQFDTYNLWNTFTRLQSL

SEQ ID NO: 10212 - protein, 458 aa, SARS coronavirus
MFITREEAIRHVRAWIGFDVEGCHATRDAVGTNLPLQLGFSTGVNLVAVPTGYVDTENNTEFTRVNAKPPPGDQFKHLIPLMYKGLPWNVVRIKIVQMLSDTLKGLSDRVVFVLWAHGFELTSMKYFVKIGPERTCCLCDKRATCFSTSSDTYACWNHSVGFDYVYNPFMIDVQQWGFTGNLQSNHDQHCQVHGNAHVASCDAIMTRCLAVHECFVKRVDWSVEYPIIGDELRVNSACRKVQHMVVKSALLADKFPVLHDIGNPKAIKCVPQAEVEWKFYDAQPCSDKAYKIEELFYSYAIHHDKFTDGVCLFWNCNVDRYPANAIVCRFDTRVLSNLNLPGCDGGSLYVNKHAFHTPAFDKSAFTNLKQLPFFYYSDSPCESHGKQVVSDIDYVPLKSATCITRCNLGGAVCRHHANEYRQYLDAYNMMISAGFSLWIYKQFDTYNLWNTFTRLQSL

SEQ ID NO: 10213 - protein, 254 aa, SARS coronavirus
MTRCLAVHECFVKRVDWSVEYPIIGDELRVNSACRKVQHMVVKSALLADKFPVLHDIGNPKAIKCVPQAEVEWKFYDAQPCSDKAYKIEELFYSYAIHHDKFTDGVCLFWNCNVDRYPANAIVCRFDTRVLSNLNLPGCDGGSLYVNKHAFHTPAFDKSAFTNLKQLPFFYYSDSPCESHGKQVVSDIDYVPLKSATCITRCNLGGAVCRHHANEYRQYLDAYNMMISAGFSLWIYKQFDTYNLWNTFTRLQSL

SEQ ID NO: 10214 - protein, 215 aa, SARS coronavirus
MVVKSALLADKFPVLHDIGNPKAIKCVPQAEVEWKFYDAQPCSDKAYKIEELFYSYAIHHDKFTDGVCLFWNCNVDRYPANAIVCRFDTRVLSNLNLPGCDGGSLYVNKHAFHTPAFDKSAFTNLKQLPFFYYSDSPCESHGKQVVSDIDYVPLKSATCITRCNLGGAVCRHHANEYRQYLDAYNMMISAGFSLWIYKQFDTYNLWNTFTRLQSL

SEQ ID NO: 10215 - protein, 75 aa, SARS coronavirus
HGKQVVSDIDYVPLKSATCITRCNLGGAVCRHHANEYRQYLDAYNMMISAGFSLWIYKQFDTYNLWNTFTRLQSL

SEQ ID NO: 10216 - protein, 1152 aa, Artificial Sequence
  Fusion protein - SARS and bovine coronaviruses
MTYRRLISMMGFKMNYQVNGYPNMFITREEAIRHVRAWIGFDVEGCHATRDAVGTNLPLQLGFSTGVNLVAVPTGYVDTENNTEFTRVNAKPPPGDQFKHLIPLMYKGLPWNVVRIKIVQMLSDTLKGLSDRVVFVLWAHGFELTSMKYFVKIGPERTCCLCDKRATCFSTSSDTYACWNHSVGFDYVYNPFMIDVQQWGFTGNLQSNHDQHCQVHGNAHVASCDAIMTRCLAVHECFVKRVDWSVEYPIIGDELRVNSACRKVQHMVVKSALLADKFPVLHDIGNPKAIKCVPQAEVEWKFYDAQPCSDKAYKIEELFYSYAIHHDKFTDGVCLFWNCNVDRYPANAIVCRFDTRVLSNLNLPGCDGGSLYVNKHAFHTPAFDKSAFTNLKQLPFFYYSDSPCESHGKQVVSDIDYVPLKSATCITRCNLGGAVCRHHANEYRQYLDAYNMMISAGFSLWIYKQFDTYNLWNTFTRLQSLENVVYNLVKTGHYTGQAGEMPCAIINDKVVAKIDKEDVVIFINNTTYPTNVAVELFAKRSIRHHPELKLFRNLNIDVCWKHVIWDYARESIFCSNTYGVCMYTDLKFIDKLNVLFDGRDNGALEAFKRSNNGVYISTTKVKSLSMIKGPPRAELNGVVVDKVGDTDCVFYFAVRKEGQDVIFSQFDSLRVSSNQSPQGNLGSNEPGNVGGNDALATSTIFTQSRVISSFTCRTDMEKDFIALDQDLFIQKYGLEDYAFEHIVYGNFNQKIIGGLHLLIGLYRRQQTSNLVIQEFVSYDSSIHSYFITDEKSGGSKSVCTVIDILLDDFVALVKSLNLNCVSKVVNVNVDFKDFQFMLWCNDEKVMTFYPRLQAASDWKPGYSMPVLYKYLNSPMERVSLWNYGKPVTLPTGCMMNVAKYTQLCQYLNTTTLAVPVNMRVLHLGAGSEKGVAPGSAVLRQWLPAGTILVDNDLYPFVSDSVATYFGDCITLPFDCQWDLIISDMYDPITKNIGEYNVSKDGFFTYICHMIRDKLALGGSVAIKITEFSWNAELYKLMGYFAFWTVFCTNANASSSEGFLIGINYLGKPKVEIDGNVMHANYLFWRNSTVWNGGAYSLFDMAKFPLKLAGTAVINLRADQINDMVYSLLEKGKLLVRDTNKEVFVGDSLVNVI

SEQ ID NO: 10217 - protein, 671 aa, Bovine coronavirus
ENVVYNLVKTGHYTGQAGEMPCAIINDKVVAKIDKEDVVIFINNTTYPTNVAVELFAKRSIRHHPELKLFRNLNIDVCWKHVIWDYARESIFCSNTYGVCMYTDLKFIDKLNVLFDGRDNGALEAFKRSNNGVYISTTKVKSLSMIKGPPRAELNGVVVDKVGDTDCVFYFAVRKEGQDVIFSQFDSLRVSSNQSPQGNLGSNEPGNVGGNDALATSTIFTQSRVISSFTCRTDMEKDFIALDQDLFIQKYGLEDYAFEHIVYGNFNQKIIGGLHLLIGLYRRQQTSNLVIQEFVSYDSSIHSYFITDEKSGGSKSVCTVIDILLDDFVALVKSLNLNCVSKVVNVNVDFKDFQFMLWCNDEKVMTFYPRLQAASDWKPGYSMPVLYKYLNSPMERVSLWNYGKPVTLPTGCMMNVAKYTQLCQYLNTTTLAVPVNMRVLHLGAGSEKGVAPGSAVLRQWLPAGTILVDNDLYPFVSDSVATYFGDCITLPFDCQWDLIISDMYDPITKNIGEYNVSKDGFFTYICHMIRDKLALGGSVAIKITEFSWNAELYKLMGYFAFWTVFCTNANASSSEGFLIGINYLGKPKVEIDGNVMHANYLFWRNSTVWNGGAYSLFDMAKFPLKLAGTAVINLRADQINDMVYSLLEKGKLLVRDTNKEVFVGDSLVNVI

SEQ ID NO: 10218 - protein, 4 aa, SARS coronavirus
NNTE

SEQ ID NO: 10219 - protein, 4 aa, SARS coronavirus
NHSV

SEQ ID NO: 10220 - protein, 93 aa, SARS coronavirus
MYSIRIEEFLYFVSFVTTWLSIVELPFYFSLRHTLDSLWISYVMKNWKLISKQCRLHNHVLYFSASRINPQFISYNRVFNRPINALNKALMDC

SEQ ID NO: 10221 - protein, 50 aa, SARS coronavirus
MKNWKLISKQCRLHNHVLYFSASRINPQFISYNRVFNRPINALNKALMDC

SEQ ID NO: 10222 - protein, 47 aa, SARS coronavirus
MCISMYLAMLVMVTLKVTRKAPLLNINHKWVIDIVKTHRMIPAGISI

SEQ ID NO: 10223 - protein, 43 aa, SARS coronavirus
MYLAMLVMVTLKVTRKAPLLNINHKWVIDIVKTHRMIPAGISI

SEQ ID NO: 10224 - protein, 39 aa, SARS coronavirus
MLVMVTLKVTRKAPLLNINHKWVIDIVKTHRMIPAGISI

SEQ ID NO: 10225 - protein, 36 aa, SARS coronavirus
MVTLKVTRKAPLLNINHKWVIDIVKTHRMIPAGISI

SEQ ID NO: 10226 - protein, 31 aa, SARS coronavirus
MFKLVTWWRFCINSGEFCVIFSVNITSRYSY

SEQ ID NO: 10227 - protein, 54 aa, SARS coronavirus
MTALYIKANPRTNVTNSFFAGDKHIRVTIDLVIHFETHHRDESTVGHVLWVCLG

SEQ ID NO: 10228 - protein, 61 aa, SARS coronavirus
MCCTFLQAELTLSSSPIIGYSTDQSTRLTKHSWTAKHLVMIASQLATCAFPCTWQCWSWLL

SEQ ID NO: 10229 - protein, 29 aa, SARS coronavirus
MSGIRCLNWSPGGGFALTLVNSVLFSVST

SEQ ID NO: 10230 - DNA, 24 bp, Artificial Sequence
  Primer
gggttgggactatcctaagtgtga

SEQ ID NO: 10231 - DNA, 21 bp, Artificial Sequence
  Primer
  misc_feature 12: N is I (inosine)
taacacacaacnccatcatca

SEQ ID NO: 10232 - DNA, 21 bp, Artificial Sequence
  Primer
ctaacatgcttaggataatgg

SEQ ID NO: 10233 - DNA, 21 bp, Artificial Sequence
  Primer
gcctctcttgttcttgctcgc

SEQ ID NO: 10234 - DNA, 21 bp, Artificial Sequence
  Primer
caggtaagcgtaaaactcatc

SEQ ID NO: 10235 - DNA, 24 bp, Artificial Sequence
  Primer
aagaagctattcgtcacgttcgtg

SEQ ID NO: 10236 - DNA, 21 bp, Artificial Sequence
  Primer
gtgctttgttaagcgcgttga

SEQ ID NO: 10237 - DNA, 21 bp, Artificial Sequence
  Primer
ctattcgtcacgttcgtgcgt

SEQ ID NO: 10238 - DNA, 23 bp, Artificial Sequence
  Primer
acaccatgcaaatgagtaccgac

SEQ ID NO: 10239 - DNA, 24 bp, Artificial Sequence
  Primer
ccaaaggacatgacctaccgtaga

SEQ ID NO: 10240 - DNA, 21 bp, Artificial Sequence
  Primer
tgccctggaatgtagtgcgta

SEQ ID NO: 10241 - DNA, 27 bp, Artificial Sequence
  Primer
aggctgaagtagaatggaagttctacg

SEQ ID NO: 10242 - DNA, 26 bp, Artificial Sequence
  Primer
tgtttgtttgttttggaattgtaacg

SEQ ID NO: 10243 - DNA, 27 bp, Artificial Sequence
  Primer
gtgtttgtttgttttggaattgtaacg

SEQ ID NO: 10244 - DNA, 24 bp, Artificial Sequence
  Primer
agtccatgagtgctttgttaagcg

SEQ ID NO: 10245 - DNA, 23 bp, Artificial Sequence
  Primer
gtccatgagtgctttgttaagcg

SEQ ID NO: 10246 - DNA, 22 bp, Artificial Sequence
  Primer
atgagtgctttgttaagcgcgt

SEQ ID NO: 10247 - DNA, 27 bp, Artificial Sequence
  Primer
tttgagtggaacataatcaatatccga

SEQ ID NO: 10248 - DNA, 21 bp, Artificial Sequence
  Primer
cagaccaatcaacgcgcttaa

SEQ ID NO: 10249 - DNA, 22 bp, Artificial Sequence
  Primer
aacagaccaatcaacgcgctta

SEQ ID NO: 10250 - DNA, 26 bp, Artificial Sequence
  Primer
tcagtgtcaacataaccagtcggtac

SEQ ID NO: 10251 - DNA, 27 bp, Artificial Sequence
  Primer
aacccatcatagagatgagtctacggt

SEQ ID NO: 10252 - DNA, 25 bp, Artificial Sequence
  Primer
catggttactctgaaggttacccgt

SEQ ID NO: 10253 - DNA, 24 bp, Artificial Sequence
  Primer
cactacatggctgagcatcgtaga

SEQ ID NO: 10254 - DNA, 26 bp, Artificial Sequence
  Primer
ttcagtgtcaacataaccagtcggta

SEQ ID NO: 10255 - DNA, 27 bp, Artificial Sequence
  Primer
ttgagtggaacataatcaatatccgac

SEQ ID NO: 10256 - DNA, 24 bp, Artificial Sequence
  Primer
gtcactacatggctgagcatcgta

SEQ ID NO: 10257 - DNA, 22 bp, Artificial Sequence
  Primer
cagaccaatcaacgcgcttaac

SEQ ID NO: 10258 - DNA, 21 bp, Artificial Sequence
  Primer
acgcacgaacgtgacgaatag

SEQ ID NO: 10259 - DNA, 22 bp, Artificial Sequence
  Primer
aagtagtgtcggatattgatta

SEQ ID NO: 10260 - DNA, 22 bp, Artificial Sequence
  Primer
tgtcggatattgattatgttcc

SEQ ID NO: 10261 - DNA, 22 bp, Artificial Sequence
  Primer
agtagtgtcggatattgattat

SEQ ID NO: 10262 - DNA, 22 bp, Artificial Sequence
  Primer
tgtagtgcgtattaagatagta

SEQ ID NO: 10263 - DNA, 23 bp, Artificial Sequence
  Primer
aagtagtgtcggatattgattat

SEQ ID NO: 10264 - DNA, 22 bp, Artificial Sequence
  Primer
caagtagtgtcggatattgatt

SEQ ID NO: 10265 - DNA, 22 bp, Artificial Sequence
  Primer
gtgtcggatattgattatgttc

SEQ ID NO: 10266 - DNA, 23 bp, Artificial Sequence
  Primer
agtgtcggatattgattatgttc

SEQ ID NO: 10267 - DNA, 23 bp, Artificial Sequence
  Primer
caagtagtgtcggatattgatta

SEQ ID NO: 10268 - DNA, 22 bp, Artificial Sequence
  Primer
gtagtgtcggatattgattatg

SEQ ID NO: 10269 - DNA, 23 bp, Artificial Sequence
  Primer
gtgtcggatattgattatgttcc

SEQ ID NO: 10270 - DNA, 24 bp, Artificial Sequence
  Primer
tagtgtcggatattgattatgttc

SEQ ID NO: 10271 - DNA, 24 bp, Artificial Sequence
  Primer
caagtagtgtcggatattgattat

SEQ ID NO: 10272 - DNA, 20 bp, Artificial Sequence
  Primer
ggctgaagtagaatggaagt

SEQ ID NO: 10273 - DNA, 22 bp, Artificial Sequence
  Primer
aatgtagtgcgtattaagatag

SEQ ID NO: 10274 - DNA, 22 bp, Artificial Sequence
  Primer
atgtagtgcgtattaagatagt

SEQ ID NO: 10275 - DNA, 21 bp, Artificial Sequence
  Primer
ggaatgtagtgcgtattaaga

SEQ ID NO: 10276 - DNA, 23 bp, Artificial Sequence
  Primer
atgtagtgcgtattaagatagta

SEQ ID NO: 10277 - DNA, 18 bp, Artificial Sequence
  Primer
cagagtcgtgttcgtcct

SEQ ID NO: 10278 - DNA, 22 bp, Artificial Sequence
  Primer
ggaatgtagtgcgtattaagat

SEQ ID NO: 10279 - DNA, 23 bp, Artificial Sequence
  Primer
aatgtagtgcgtattaagatagt

SEQ ID NO: 10280 - DNA, 21 bp, Artificial Sequence
  Primer
aagtagtgtcggatattgatt

SEQ ID NO: 10281 - DNA, 23 bp, Artificial Sequence
  Primer
gaatgtagtgcgtattaagatag

SEQ ID NO: 10282 - DNA, 22 bp, Artificial Sequence
  Primer
aacataatcaatatccgacact

SEQ ID NO: 10283 - DNA, 23 bp, Artificial Sequence
  Primer
aacataatcaatatccgacacta

SEQ ID NO: 10284 - DNA, 23 bp, Artificial Sequence
  Primer
tgtatagcataagaatagaagag

SEQ ID NO: 10285 - DNA, 23 bp, Artificial Sequence
  Primer
gtgatgtatagcataagaataga

SEQ ID NO: 10286 - DNA, 24 bp, Artificial Sequence
  Primer
gtgatgtatagcataagaatagaa

SEQ ID NO: 10287 - DNA, 23 bp, Artificial Sequence
  Primer
gaacataatcaatatccgacact

SEQ ID NO: 10288 - DNA, 24 bp, Artificial Sequence
  Primer
atgtatagcataagaatagaagag

SEQ ID NO: 10289 - DNA, 24 bp, Artificial Sequence
  Primer
gaacataatcaatatccgacacta

SEQ ID NO: 10290 - DNA, 25 bp, Artificial Sequence
  Primer
gatgtatagcataagaatagaagag

SEQ ID NO: 10291 - DNA, 25 bp, Artificial Sequence
  Primer
tgatgtatagcataagaatagaaga

SEQ ID NO: 10292 - DNA, 18 bp, Artificial Sequence
  Primer
caatcaacgcgcttaaca

SEQ ID NO: 10293 - DNA, 23 bp, Artificial Sequence
  Primer
acataatcaatatccgacactac

SEQ ID NO: 10294 - DNA, 23 bp, Artificial Sequence
  Primer
tgatgtatagcataagaatagaa

SEQ ID NO: 10295 - DNA, 19 bp, Artificial Sequence
  Primer
caatcaacgcgcttaacaa

SEQ ID NO: 10296 - DNA, 22 bp, Artificial Sequence
  Primer
atcttaatacgcactacattcc

SEQ ID NO: 10297 - DNA, 23 bp, Artificial Sequence
  Primer
ctatcttaatacgcactacattc

SEQ ID NO: 10298 - DNA, 21 bp, Artificial Sequence
  Primer
tcttaatacgcactacattcc

SEQ ID NO: 10299 - DNA, 403 bp, SARS coronavirus
caggttcatcaaaatgtgtgtgttctgtgattgatcttttacttgatgactttgtcgagataataaagtcacaagatttgtcagtgatttcaaaagtggtcaaggttacaattgactatgctgaaatttcattcatgctttggtgtaaggatggacatgttgaaaccttctacccaaaactacaagcaagtcaagcgtggcaaccaggtgttgcgatgcctaacttgtacaagatgcaaagaatgcttcttgaaaagtgtgaccttcagaattatggtgaaaatgctgttataccaaaaggaataatgatgaatgtcgcaaagtatactcaactgtgtcaatacttaaatacacttactttagctgtaccctccaacatgagagttattcactttggtgctgg

SEQ ID NO: 10300 - protein, 9 aa, Artificial Sequence
  Inferred translation product
QVHQNVCVL

SEQ ID NO: 10301 - protein, 10 aa, Artificial Sequence
  Inferred translation product
LIFYLMTLSR

SEQ ID NO: 10302 - protein, 6 aa, Artificial Sequence
  Inferred translation product
SHKICQ

SEQ ID NO: 10303 - protein, 72 aa, Artificial Sequence
  Inferred translation product
FQKWSRLQLTMLKFHSCFGVRMDMLKPSTQNYKQVKRGNQVLRCLTCTRCKECFLKSVTFRIMVKMLLYQKE

SEQ ID NO: 10304 - protein, 11 aa, Artificial Sequence
  Inferred translation product
MSQSILNCVNT

SEQ ID NO: 10305 - protein, 4 aa, Artificial Sequence
  Inferred translation product
IHLL

SEQ ID NO: 10306 - protein, 5 aa, Artificial Sequence
  Inferred translation product
LYPPT

SEQ ID NO: 10307 - protein, 7 aa, Artificial Sequence
  Inferred translation product
ELFTLVL

SEQ ID NO: 10308 - protein, 10 aa, Artificial Sequence
  Inferred translation product
RFIKMCVFCD

SEQ ID NO: 10309 - protein, 21 aa, Artificial Sequence
  Inferred translation product
LCRDNKVTRFVSDFKSGQGYN

SEQ ID NO: 10310 - protein, 7 aa, Artificial Sequence
  Inferred translation product
NFIHALV

SEQ ID NO: 10311 - protein, 4 aa, Artificial Sequence
  Inferred translation product
GWTC

SEQ ID NO: 10312 - protein, 19 aa, Artificial Sequence
  Inferred translation product
NLLPKTTSKSSVATRCCDA

SEQ ID NO: 10313 - protein, 9 aa, Artificial Sequence
  Inferred translation product
LVQDAKNAS

SEQ ID NO: 10314 - protein, 5 aa, Artificial Sequence
  Inferred translation product
PSELW

SEQ ID NO: 10315 - protein, 41 aa, Artificial Sequence
  Inferred translation product
KCCYTKRNNDECRKVYSTVSILKYTYFSCTLQHESYSLWCW

SEQ ID NO: 10316 - protein, 134 aa, Artificial Sequence
  Inferred translation product
GSSKCVCSVIDLLLDDFVEIIKSQDLSVISKVVKVTIDYAEISFMLWCKDGHVETFYPKLQASQAWQPGVAMPNLYKMQRMLLEKCDLQNYGENAVIPKGIMMNVAKYTQLCQYLNTLTLAVPSNMRVIHFGAG

SEQ ID NO: 10317 - protein, 4 aa, Artificial Sequence
  Inferred translation product
PAPK

SEQ ID NO: 10318 - protein, 16 aa, Artificial Sequence
  Inferred translation product
ITLMLEGTAKVSVFKY

SEQ ID NO: 10319 - protein, 18 aa, Artificial Sequence
  Inferred translation product
VYFATFIIIPFGITAFSP

SEQ ID NO: 10320 - protein, 24 aa, Artificial Sequence
  Inferred translation product
RSHFSRSILCILYKLGIATPGCHA

SEQ ID NO: 10321 - protein, 6 aa, Artificial Sequence
  Inferred translation product
LACSFG

SEQ ID NO: 10322 - protein, 17 aa, Artificial Sequence
  Inferred translation product
KVSTCPSLHQSMNEISA

SEQ ID NO: 10323 - protein, 38 aa, Artificial Sequence
  Inferred translation product
SIVTLTTFEITDKSCDFIISTKSSSKRSITEHTHFDEP

SEQ ID NO: 10324 - protein, 5 aa, Artificial Sequence
  Inferred translation product
QHQSE

SEQ ID NO: 10325 - protein, 9 aa, Artificial Sequence
  Inferred translation product
LSCWRVQLK

SEQ ID NO: 10326 - protein, 21 aa, Artificial Sequence
  Inferred translation product
VYLSIDTVEYTLRHSSLFLLV

SEQ ID NO: 10327 - protein, 22 aa, Artificial Sequence
  Inferred translation product
QHFHHNSEGHTFQEAFFASCTS

SEQ ID NO: 10328 - protein, 28 aa, Artificial Sequence
  Inferred translation product
ASQHLVATLDLLVVLGRRFQHVHPYTKA

SEQ ID NO: 10329 - protein, 8 aa, Artificial Sequence
  Inferred translation product
MKFQHSQL

SEQ ID NO: 10330 - protein, 33 aa, Artificial Sequence
  Inferred translation product
PLLKSLTNLVTLLSRQSHQVKDQSQNTHILMNL

SEQ ID NO: 10331 - protein, 13 aa, Artificial Sequence
  Inferred translation product
STKVNNSHVGGYS

SEQ ID NO: 10332 - protein, 4 aa, Artificial Sequence
  Inferred translation product
SKCI

SEQ ID NO: 10333 - protein, 54 aa, Artificial Sequence
  Inferred translation product
VLTQLSILCDIHHYSFWYNSIFTIILKVTLFKKHSLHLVQVRHRNTWLPRLTCL

SEQ ID NO: 10334 - protein, 16 aa, Artificial Sequence
  Inferred translation product
FWVEGFNMSILTPKHE

SEQ ID NO: 10335 - protein, 12 aa, Artificial Sequence
  Inferred translation product
NFSIVNCNLDHF

SEQ ID NO: 10336 - protein, 9 aa, Artificial Sequence
  Inferred translation product
LYYLDKVIK

SEQ ID NO: 10337 - protein, 9 aa, Artificial Sequence
  Inferred translation product
KINHRTHTF

SEQ ID NO: 10338 - protein, 90 aa, SARS coronavirus
MLWCKDGHVETFYPKLQASQAWQPGVAMPNLYKMQRMLLEKCDLQNYGENAVIPKGIMMNVAKYTQLCQYLNTLTLAVPSNMRVIHFGAG

SEQ ID NO: 10339 - protein, 109 aa, SARS coronavirus
MSVISKVVKVTIDYAEISFMLWCKDGHVETFYPKLQASQAWQPGVAMPNLYKMQRMLLEKCDLQNYGENAVIPKGIMMNVAKYTQLCQYLNTLTLAVPSNMRVIHFGAG

SEQ ID NO: 10340 - protein, 62 aa, SARS coronavirus
MLKFHSCFGVRMDMLKPSTQNYKQVKRGNQVLRCLTCTRCKECFLKSVTFRIMVKMLLYQKE

SEQ ID NO: 10341 - protein, 34 aa, SARS coronavirus
MTTFEITDKSCDFIISTKSSSKRSITEHTHFDEP

SEQ ID NO: 10342 - protein, 31 aa, SARS coronavirus
MKSLTNLVTLLSRQSHQVKDQSQNTHILMNL

SEQ ID NO: 10343 - protein, 89 aa, SARS coronavirus
LWCKDGHVETFYPKLQASQAWQPGVAMPNLYKMQRMLLEKCDLQNYGENAVIPKGIMMNVAKYTQLCQYLNTLTLAVPSNMRVIHFGAG

SEQ ID NO: 10344 - protein, 108 aa, SARS coronavirus
SVISKVVKVTIDYAEISFMLWCKDGHVETFYPKLQASQAWQPGVAMPNLYKMQRMLLEKCDLQNYGENAVIPKGIMMNVAKYTQLCQYLNTLTLAVPSNMRVIHFGAG

SEQ ID NO: 10345 - protein, 61 aa, SARS coronavirus
LKFHSCFGVRMDMLKPSTQNYKQVKRGNQVLRCLTCTRCKECFLKSVTFRIMVKMLLYQKE

SEQ ID NO: 10346 - protein, 34 aa, SARS coronavirus
LTTFEITDKSCDFIISTKSSSKRSITEHTHFDEP

SEQ ID NO: 10347 - protein, 31 aa, SARS coronavirus
LKSLTNLVTLLSRQSHQVKDQSQNTHILMNL

SEQ ID NO: 10348 - protein, 5 aa, SARS coronavirus
ASQAW

SEQ ID NO: 10349 - protein, 5 aa, SARS coronavirus
ASRAW

SEQ ID NO: 10350 - protein, 5 aa, SARS coronavirus
VPSNM

SEQ ID NO: 10351 - protein, 5 aa, SARS coronavirus
VPTNM

SEQ ID NO: 10352 - DNA, 29 bp, Artificial Sequence
  Primer
tataccaaaaggaataatgatgaatgtcg

SEQ ID NO: 10353 - DNA, 28 bp, Artificial Sequence
  Primer
ataccaaaaggaataatgatgaatgtcg

SEQ ID NO: 10354 - DNA, 25 bp, Artificial Sequence
  Primer
ccaaaaggaataatgatgaatgtcg

SEQ ID NO: 10355 - DNA, 27 bp, Artificial Sequence
  Primer
taccaaaaggaataatgatgaatgtcg

SEQ ID NO: 10356 - DNA, 26 bp, Artificial Sequence
  Primer
accaaaaggaataatgatgaatgtcg

SEQ ID NO: 10357 - DNA, 18 bp, Artificial Sequence
  Primer
tggcaaccaggtgttgcg

SEQ ID NO: 10358 - DNA, 17 bp, Artificial Sequence
  Primer
ggcaaccaggtgttgcg

SEQ ID NO: 10359 - DNA, 27 bp, Artificial Sequence
  Primer
gatcttttacttgatgactttgtcgag

SEQ ID NO: 10360 - DNA, 17 bp, Artificial Sequence
  Primer
gcaaccaggtgttgcga

SEQ ID NO: 10361 - DNA, 23 bp, Artificial Sequence
  Primer
aggaataatgatgaatgtcgcaa

SEQ ID NO: 10362 - DNA, 23 bp, Artificial Sequence
  Primer
aaggaataatgatgaatgtcgca

SEQ ID NO: 10363 - DNA, 24 bp, Artificial Sequence
  Primer
aaaggaataatgatgaatgtcgca

SEQ ID NO: 10364 - DNA, 26 bp, Artificial Sequence
  Primer
tcttttacttgatgactttgtcgaga

SEQ ID NO: 10365 - DNA, 27 bp, Artificial Sequence
  Primer
atcttttacttgatgactttgtcgaga

SEQ ID NO: 10366 - DNA, 23 bp, Artificial Sequence
  Primer
ggaataatgatgaatgtcgcaaa

SEQ ID NO: 10367 - DNA, 25 bp, Artificial Sequence
  Primer
caaaaggaataatgatgaatgtcgc

SEQ ID NO: 10368 - DNA, 24 bp, Artificial Sequence
  Primer
aaaaggaataatgatgaatgtcgc

SEQ ID NO: 10369 - DNA, 23 bp, Artificial Sequence
  Primer
caaaactacaagcaagtcaagcg

SEQ ID NO: 10370 - DNA, 28 bp, Artificial Sequence
  Primer
cttttacttgatgactttgtcgagataa

SEQ ID NO: 10371 - DNA, 18 bp, Artificial Sequence
  Primer
aaccaggtgttgcgatgc

SEQ ID NO: 10372 - DNA, 19 bp, Artificial Sequence
  Primer
caaccaggtgttgcgatgc

SEQ ID NO: 10373 - DNA, 17 bp, Artificial Sequence
  Primer
ccaggtgttgcgatgcc

SEQ ID NO: 10374 - DNA, 18 bp, Artificial Sequence
  Primer
accaggtgttgcgatgcc

SEQ ID NO: 10375 - DNA, 27 bp, Artificial Sequence
  Primer
gaattatggtgaaaatgctgttatacc

SEQ ID NO: 10376 - DNA, 28 bp, Artificial Sequence
  Primer
agaattatggtgaaaatgctgttatacc

SEQ ID NO: 10377 - DNA, 27 bp, Artificial Sequence
  Primer
cacagttgagtatactttgcgacattc

SEQ ID NO: 10378 - DNA, 22 bp, Artificial Sequence
  Primer
tacaagttaggcatcgcaacac

SEQ ID NO: 10379 - DNA, 22 bp, Artificial Sequence
  Primer
gtacaagttaggcatcgcaaca

SEQ ID NO: 10380 - DNA, 25 bp, Artificial Sequence
  Primer
acacagttgagtatactttgcgaca

SEQ ID NO: 10381 - DNA, 17 bp, Artificial Sequence
  Primer
ctggttgccacgcttga

SEQ ID NO: 10382 - DNA, 26 bp, Artificial Sequence
  Primer
acacagttgagtatactttgcgacat

SEQ ID NO: 10383 - DNA, 22 bp, Artificial Sequence
  Primer
tgtacaagttaggcatcgcaac

SEQ ID NO: 10384 - DNA, 28 bp, Artificial Sequence
  Primer
caaatcttgtgactttattatctcgaca

SEQ ID NO: 10385 - DNA, 22 bp, Artificial Sequence
  Primer
ttgtacaagttaggcatcgcaa

SEQ ID NO: 10386 - DNA, 29 bp, Artificial Sequence
  Primer
gacaaatcttgtgactttattatctcgac

SEQ ID NO: 10387 - DNA, 26 bp, Artificial Sequence
  Primer
tgacacagttgagtatactttgcgac

SEQ ID NO: 10388 - DNA, 28 bp, Artificial Sequence
  Primer
tgacaaatcttgtgactttattatctcg

SEQ ID NO: 10389 - DNA, 17 bp, Artificial Sequence
  Primer
tggttgccacgcttgac

SEQ ID NO: 10390 - DNA, 28 bp, Artificial Sequence
  Primer
gacaaatcttgtgactttattatctcga

SEQ ID NO: 10391 - DNA, 26 bp, Artificial Sequence
  Primer
cacagttgagtatactttgcgacatt

SEQ ID NO: 10392 - DNA, 25 bp, Artificial Sequence
  Primer
ttgacacagttgagtatactttgcg

SEQ ID NO: 10393 - DNA, 25 bp, Artificial Sequence
  Primer
tgacacagttgagtatactttgcga

SEQ ID NO: 10394 - DNA, 22 bp, Artificial Sequence
  Primer
cttgtacaagttaggcatcgca

SEQ ID NO: 10395 - DNA, 29 bp, Artificial Sequence
  Primer
aaatcttgtgactttattatctcgacaaa

SEQ ID NO: 10396 - DNA, 18 bp, Artificial Sequence
  Primer
caacacctggttgccacg

SEQ ID NO: 10397 - DNA, 24 bp, Artificial Sequence
  Primer
catcttgtacaagttaggcatcgc

SEQ ID NO: 10398 - DNA, 30 bp, Artificial Sequence
  Primer
gacattcatcattattccttttggtataac

SEQ ID NO: 10399 - DNA, 26 bp, Artificial Sequence
  Primer
tgaataactctcatgttggagggtac

SEQ ID NO: 10400 - DNA, 29 bp, Artificial Sequence
  Primer
cgacaaagtcatcaagtaaaagatcaatc

SEQ ID NO: 10401 - DNA, 24 bp, Artificial Sequence
  Primer
gcatcttgtacaagttaggcatcg

SEQ ID NO: 10402 - DNA, 15 bp, Artificial Sequence
  Primer
tcaagcgtggcaacc

SEQ ID NO: 10403 - DNA, 15 bp, Artificial Sequence
  Primer
tcactttggtgctgg

SEQ ID NO: 10404 - DNA, 15 bp, Artificial Sequence
  Primer
caggtgttgcgatgc

SEQ ID NO: 10405 - DNA, 15 bp, Artificial Sequence
  Primer
cgtggcaaccaggtg

SEQ ID NO: 10406 - DNA, 15 bp, Artificial Sequence
  Primer
accctccaacatgag

SEQ ID NO: 10407 - DNA, 15 bp, Artificial Sequence
  Primer
agcaagtcaagcgtg

SEQ ID NO: 10408 - DNA, 15 bp, Artificial Sequence
  Primer
aagcgtggcaaccag

SEQ ID NO: 10409 - DNA, 15 bp, Artificial Sequence
  Primer
ggtgttgcgatgcct

SEQ ID NO: 10410 - DNA, 15 bp, Artificial Sequence
  Primer
tggcaaccaggtgtt

SEQ ID NO: 10411 - DNA, 15 bp, Artificial Sequence
  Primer
accaggtgttgcgat

SEQ ID NO: 10412 - DNA, 15 bp, Artificial Sequence
  Primer
gcaagtcaagcgtgg

SEQ ID NO: 10413 - DNA, 15 bp, Artificial Sequence
  Primer
ccaggtgttgcgatg

SEQ ID NO: 10414 - DNA, 15 bp, Artificial Sequence
  Primer
gcgtggcaaccaggt

SEQ ID NO: 10415 - DNA, 15 bp, Artificial Sequence
  Primer
aaccaggtgttgcga

SEQ ID NO: 10416 - DNA, 15 bp, Artificial Sequence
  Primer
gtcaagcgtggcaac

SEQ ID NO: 10417 - DNA, 15 bp, Artificial Sequence
  Primer
gtgttgcgatgccta

SEQ ID NO: 10418 - DNA, 15 bp, Artificial Sequence
  Primer
agcgtggcaaccagg

SEQ ID NO: 10419 - DNA, 15 bp, Artificial Sequence
  Primer
ggcaaccaggtgttg

SEQ ID NO: 10420 - DNA, 15 bp, Artificial Sequence
  Primer
gtggcaaccaggtgt

SEQ ID NO: 10421 - DNA, 15 bp, Artificial Sequence
  Primer
gcgatgcctaacttg

SEQ ID NO: 10422 - DNA, 15 bp, Artificial Sequence
  Primer
gttgcgatgcctaac

SEQ ID NO: 10423 - DNA, 15 bp, Artificial Sequence
  Primer
ggtgtaaggatggac

SEQ ID NO: 10424 - DNA, 15 bp, Artificial Sequence
  Primer
cctccaacatgagag

SEQ ID NO: 10425 - DNA, 15 bp, Artificial Sequence
  Primer
gtaccctccaacatg

SEQ ID NO: 10426 - DNA, 15 bp, Artificial Sequence
  Primer
agctgtaccctccaa

SEQ ID NO: 10427 - DNA, 15 bp, Artificial Sequence
  Primer
aagtcaagcgtggca

SEQ ID NO: 10428 - DNA, 15 bp, Artificial Sequence
  Primer
agtcaagcgtggcaa

SEQ ID NO: 10429 - DNA, 15 bp, Artificial Sequence
  Primer
ttagctgtaccctcc

SEQ ID NO: 10430 - DNA, 15 bp, Artificial Sequence
  Primer
gctgtaccctccaac

SEQ ID NO: 10431 - DNA, 15 bp, Artificial Sequence
  Primer
ccctccaacatgaga

SEQ ID NO: 10432 - DNA, 15 bp, Artificial Sequence
  Primer
ctgtaccctccaaca

SEQ ID NO: 10433 - DNA, 15 bp, Artificial Sequence
  Primer
tagctgtaccctcca

SEQ ID NO: 10434 - DNA, 15 bp, Artificial Sequence
  Primer
aggcatcgcaacacc

SEQ ID NO: 10435 - DNA, 15 bp, Artificial Sequence
  Primer
acacctggttgccac

SEQ ID NO: 10436 - DNA, 15 bp, Artificial Sequence
  Primer
taggcatcgcaacac

SEQ ID NO: 10437 - DNA, 15 bp, Artificial Sequence
  Primer
catcgcaacacctgg

SEQ ID NO: 10438 - DNA, 15 bp, Artificial Sequence
  Primer
gcatcgcaacacctg

SEQ ID NO: 10439 - DNA, 15 bp, Artificial Sequence
  Primer
cacctggttgccacg

SEQ ID NO: 10440 - DNA, 15 bp, Artificial Sequence
  Primer
gttgccacgcttgac

SEQ ID NO: 10441 - DNA, 15 bp, Artificial Sequence
  Primer
aacacctggttgcca

SEQ ID NO: 10442 - DNA, 15 bp, Artificial Sequence
  Primer
atcgcaacacctggt

SEQ ID NO: 10443 - DNA, 15 bp, Artificial Sequence
  Primer
ggcatcgcaacacct

SEQ ID NO: 10444 - DNA, 15 bp, Artificial Sequence
  Primer
tggttgccacgcttg

SEQ ID NO: 10445 - DNA, 15 bp, Artificial Sequence
  Primer
cgcaacacctggttg

SEQ ID NO: 10446 - DNA, 15 bp, Artificial Sequence
  Primer
ggttgccacgcttga

SEQ ID NO: 10447 - DNA, 15 bp, Artificial Sequence
  Primer
ttggagggtacagct

SEQ ID NO: 10448 - DNA, 15 bp, Artificial Sequence
  Primer
tcgcaacacctggtt

SEQ ID NO: 10449 - DNA, 15 bp, Artificial Sequence
  Primer
gccacgcttgacttg

SEQ ID NO: 10450 - DNA, 15 bp, Artificial Sequence
  Primer
tgttggagggtacag

SEQ ID NO: 10451 - DNA, 15 bp, Artificial Sequence
  Primer
gttaggcatcgcaac

SEQ ID NO: 10452 - DNA, 15 bp, Artificial Sequence
  Primer
ccacgcttgacttgc

SEQ ID NO: 10453 - DNA, 15 bp, Artificial Sequence
  Primer
ctctcatgttggagg

SEQ ID NO: 10454 - DNA, 15 bp, Artificial Sequence
  Primer
gtccatccttacacc

SEQ ID NO: 10455 - DNA, 15 bp, Artificial Sequence
  Primer
gttggagggtacagc

SEQ ID NO: 10456 - DNA, 15 bp, Artificial Sequence
  Primer
ttgccacgcttgact

SEQ ID NO: 10457 - DNA, 15 bp, Artificial Sequence
  Primer
cctggttgccacgct

SEQ ID NO: 10458 - DNA, 15 bp, Artificial Sequence
  Primer
cacgcttgacttgct

SEQ ID NO: 10459 - DNA, 15 bp, Artificial Sequence
  Primer
ctcatgttggagggt

SEQ ID NO: 10460 - DNA, 15 bp, Artificial Sequence
  Primer
tggagggtacagcta

SEQ ID NO: 10461 - DNA, 15 bp, Artificial Sequence
  Primer
tgccacgcttgactt

SEQ ID NO: 10462 - DNA, 15 bp, Artificial Sequence
  Primer
ccagcaccaaagtga

SEQ ID NO: 10463 - DNA, 15 bp, Artificial Sequence
  Primer
ctggttgccacgctt

SEQ ID NO: 10464 - DNA, 15 bp, Artificial Sequence
  Primer
catgttggagggtac

SEQ ID NO: 10465 - DNA, 24 bp, Artificial Sequence
  Primer
tgtcaatacttaaatacacttact

SEQ ID NO: 10466 - DNA, 25 bp, Artificial Sequence
  Primer
gtcaatacttaaatacacttacttt

SEQ ID NO: 10467 - DNA, 25 bp, Artificial Sequence
  Primer
tgtcaatacttaaatacacttactt

SEQ ID NO: 10468 - DNA, 26 bp, Artificial Sequence
  Primer
tgtcaatacttaaatacacttacttt

SEQ ID NO: 10469 - DNA, 24 bp, Artificial Sequence
  Primer
gtcaatacttaaatacacttactt

SEQ ID NO: 10470 - DNA, 26 bp, Artificial Sequence
  Primer
caatacttaaatacacttactttagc

SEQ ID NO: 10471 - DNA, 25 bp, Artificial Sequence
  Primer
aatacttaaatacacttactttagc

SEQ ID NO: 10472 - DNA, 24 bp, Artificial Sequence
  Primer
tcaatacttaaatacacttacttt

SEQ ID NO: 10473 - DNA, 24 bp, Artificial Sequence
  Primer
atacttaaatacacttactttagc

SEQ ID NO: 10474 - DNA, 21 bp, Artificial Sequence
  Primer
acacttactttagctgtaccc

SEQ ID NO: 10475 - DNA, 23 bp, Artificial Sequence
  Primer
ctcaactgtgtcaatacttaaat

SEQ ID NO: 10476 - DNA, 20 bp, Artificial Sequence
  Primer
cacttactttagctgtaccc

SEQ ID NO: 10477 - DNA, 22 bp, Artificial Sequence
  Primer
atactcaactgtgtcaatactt

SEQ ID NO: 10478 - DNA, 21 bp, Artificial Sequence
  Primer
cacttactttagctgtaccct

SEQ ID NO: 10479 - DNA, 22 bp, Artificial Sequence
  Primer
acacttactttagctgtaccct

SEQ ID NO: 10480 - DNA, 21 bp, Artificial Sequence
  Primer
acttactttagctgtaccctc

SEQ ID NO: 10481 - DNA, 20 bp, Artificial Sequence
  Primer
acttactttagctgtaccct

SEQ ID NO: 10482 - DNA, 24 bp, Artificial Sequence
  Primer
caactgtgtcaatacttaaataca

SEQ ID NO: 10483 - DNA, 22 bp, Artificial Sequence
  Primer
cacttactttagctgtaccctc

SEQ ID NO: 10484 - DNA, 25 bp, Artificial Sequence
  Primer
tcaactgtgtcaatacttaaataca

SEQ ID NO: 10485 - DNA, 23 bp, Artificial Sequence
  Primer
tttattatctcgacaaagtcatc

SEQ ID NO: 10486 - DNA, 22 bp, Artificial Sequence
  Primer
ttattatctcgacaaagtcatc

SEQ ID NO: 10487 - DNA, 21 bp, Artificial Sequence
  Primer
tcgacaaagtcatcaagtaaa

SEQ ID NO: 10488 - DNA, 22 bp, Artificial Sequence
  Primer
tatctcgacaaagtcatcaagt

SEQ ID NO: 10489 - DNA, 24 bp, Artificial Sequence
  Primer
tttattatctcgacaaagtcatca

SEQ ID NO: 10490 - DNA, 22 bp, Artificial Sequence
  Primer
ctcgacaaagtcatcaagtaaa

SEQ ID NO: 10491 - DNA, 21 bp, Artificial Sequence
  Primer
atctcgacaaagtcatcaagt

SEQ ID NO: 10492 - DNA, 20 bp, Artificial Sequence
  Primer
ctcgacaaagtcatcaagta

SEQ ID NO: 10493 - DNA, 23 bp, Artificial Sequence
  Primer
ttattatctcgacaaagtcatca

SEQ ID NO: 10494 - DNA, 23 bp, Artificial Sequence
  Primer
attatctcgacaaagtcatcaag

SEQ ID NO: 10495 - DNA, 21 bp, Artificial Sequence
  Primer
tcttgtgactttattatctcg

SEQ ID NO: 10496 - DNA, 22 bp, Artificial Sequence
  Primer
ttatctcgacaaagtcatcaag

SEQ ID NO: 10497 - DNA, 22 bp, Artificial Sequence
  Primer
tattatctcgacaaagtcatca

SEQ ID NO: 10498 - DNA, 21 bp, Artificial Sequence
  Primer
tatctcgacaaagtcatcaag

SEQ ID NO: 10499 - DNA, 21 bp, Artificial Sequence
  Primer
attatctcgacaaagtcatca

SEQ ID NO: 10500 - DNA, 20 bp, Artificial Sequence
  Primer
tctcgacaaagtcatcaagt

SEQ ID NO: 10501 - DNA, 20 bp, Artificial Sequence
  Primer
tcgacaaagtcatcaagtaa

SEQ ID NO: 10502 - DNA, 21 bp, Artificial Sequence
  Primer
tattatctcgacaaagtcatc

SEQ ID NO: 10503 - DNA, 20 bp, Artificial Sequence
  Primer
atctcgacaaagtcatcaag

SEQ ID NO: 10504 - DNA, 20 bp, Artificial Sequence
  Primer
cgacaaagtcatcaagtaaa

SEQ ID NO: 10505 - DNA, 1006 bp, SARS coronavirus
taggtttttacctacccaggaaaagccaaccaacctcgatctcttgtagatctgttctctaaacgaacaaattaaaatgtctgataatggaccccaatcaaaccaacgtagtgccccccgcattacatttggtggacccacagattcaactgacaataaccagaatggaggactgcaatggggcaaggccaaaacagcgccgaccccaaggtttacccaataatattgcgtcttggttcacagctctcactcagcatggcaaggaggaacttagattccctcgaggccagggcgttccaatcaacaccaatagtggtccagatgaccaaattggctactaccgaagagctacccgacgagttcgtggtggtgacggcaaaatgaaagagctcagccccagatggtacttctattacctaggaactggcccagaagcttcacttccctacggcgctaacaaagaaggcatcgtatgggttgcaactgagggagccttgaatacacccaaagaccacattggcacccgcaatcctaataacaatgctgccaccgtgctacaacttcctcaaggaacaacattgccaaaaggcttctacgcagagggaagcagaggcggcagtcaagcctcttctcgctcctcatcacgtagtcgcggtaattcaagaaattcaactcctggcagcagtaggggaaattctcctgctcgaatggctagcggaggtggtgaaactgccctcgcgctattgctgctagacagattgaaccagcttgagagcaaagtttctggtaaaggccaacaacaacaaggccaaactgtcactaagaaatctgctgctgaggcatctaaaaagcctcgccaaaaacgtactgccacaaaacagtacaacgtcactcaagcatttgggagacgtggtccagaacaaacccaaggaaatttcggggaccaagacctaatcagacaaggaactgattacaaacattgggccgcaaattgcacaatttgcct

SEQ ID NO: 10506 - protein, 23 aa, Artificial Sequence
  Inferred translation product
VFTYPGKANQPRSLVDLFSKRTN

SEQ ID NO: 10507 - protein, 7 aa, Artificial Sequence
  Inferred translation product
WTPIKPT

SEQ ID NO: 10508 - protein, 13 aa, Artificial Sequence
  Inferred translation product
CPPHYIWWTHRFN

SEQ ID NO: 10509 - protein, 74 aa, Artificial Sequence
  Inferred translation product
PEWRTAMGQGQNSADPKVYPIILRLGSQLSLSMARRNLDSLEARAFQSTPIVVQMTKLATTEELPDEFVVVTAK

SEQ ID NO: 10510 - protein, 11 aa, Artificial Sequence
  Inferred translation product
KSSAPDGTSIT

SEQ ID NO: 10511 - protein, 25 aa, Artificial Sequence
  Inferred translation product
ELAQKLHFPTALTKKASYGLQLREP

SEQ ID NO: 10512 - protein, 84 aa, Artificial Sequence
  Inferred translation product
IHPKTTLAPAILITMLPPCYNFLKEQHCQKASTQREAEAAVKPLLAPHHVVAVIQEIQLLAAVGEILLLEWLAEVVKLPSRYCC

SEQ ID NO: 10513 - protein, 63 aa, Artificial Sequence
  Inferred translation product
TSLRAKFLVKANNNKAKLSLRNLLLRHLKSLAKNVLPQNSTTSLKHLGDVVQNKPKEISGTKT

SEQ ID NO: 10514 - protein, 17 aa, Artificial Sequence
  Inferred translation product
SDKELITNIGPQIAQFA

SEQ ID NO: 10515 - protein, 15 aa, Artificial Sequence
  Inferred translation product
RFLPTQEKPTNLDLL

SEQ ID NO: 10516 - protein, 57 aa, Artificial Sequence
  Inferred translation product
ICSLNEQIKMSDNGPQSNQRSAPRITFGGPTDSTDNNQNGGLQWGKAKTAPTPRFTQ

SEQ ID NO: 10517 - protein, 16 aa, Artificial Sequence
  Inferred translation product
YCVLVHSSHSAWQGGT

SEQ ID NO: 10518 - protein, 12 aa, Artificial Sequence
  Inferred translation product
IPSRPGRSNQHQ

SEQ ID NO: 10519 - protein, 15 aa, Artificial Sequence
  Inferred translation product
PNWLLPKSYPTSSWW

SEQ ID NO: 10520 - protein, 27 aa, Artificial Sequence
  Inferred translation product
RQNERAQPQMVLLLPRNWPRSFTSLRR

SEQ ID NO: 10521 - protein, 9 aa, Artificial Sequence
  Inferred translation product
QRRHRMGCN

SEQ ID NO: 10522 - protein, 15 aa, Artificial Sequence
  Inferred translation product
GSLEYTQRPHWHPQS

SEQ ID NO: 10523 - protein, 36 aa, Artificial Sequence; identical to SEQ ID NO: 7160
  Inferred translation product

SEQ ID NO: 10524 - protein, 9 aa, Artificial Sequence
  Inferred translation product
FKKFNSWQQ

SEQ ID NO: 10525 - protein, 8 aa, Artificial Sequence
  Inferred translation product
GKFSCSNG

SEQ ID NO: 10526 - protein, 14 aa, Artificial Sequence
  Inferred translation product
NCPRAIAARQIEPA

SEQ ID NO: 10527 - protein, 5 aa, Artificial Sequence
  Inferred translation product
EQSFW

SEQ ID NO: 10528 - protein, 10 aa, Artificial Sequence
  Inferred translation product
RPTTTRPNCH

SEQ ID NO: 10529 - protein, 4 aa, Artificial Sequence
  Inferred translation product
EICC

SEQ ID NO: 10530 - protein, 40 aa, Artificial Sequence; identical to SEQ ID NO: 7167
  Inferred translation product

SEQ ID NO: 10531 - protein, 12 aa, Artificial Sequence
  Inferred translation product
LQTLGRKLHNLP

SEQ ID NO: 10532 - protein, 19 aa, Artificial Sequence
  Inferred translation product
GFYLPRKSQPTSISCRSVL

SEQ ID NO: 10533 - protein, 314 aa, Artificial Sequence
  SARS coronavirus
TNKLKCLIMDPNQTNVVPPALHLVDPQIQLTITRMEDCNGARPKQRRPQGLPNNIASWFTALTQHGKEELRFPRGQGVPINTNSGPDDQIGYYRRATRRVRGGDGKMKELSPRWYFYYLGTGPEASLPYGANKEGIVWVATEGALNTPKDHIGTRNPNNNAATVLQLPQGTTLPKGFYAEGSRGGSQASSRSSSRSRGNSRNSTPGSSRGNSPARMASGGGETALALLLLDRLNQLESKVSGKGQQQQGQTVTKKSAAEASKKPRQKRTATKQYNVTQAFGRRGPEQTQGNFGDQDLIRQGTDYKHWAANCTIC

SEQ ID NO: 10534 - protein, 11 aa, Artificial Sequence
  Inferred translation product
RQIVQFAAQCL

SEQ ID NO: 10535 - protein, 25 aa, Artificial Sequence
  Inferred translation product
SVPCLIRSWSPKFPWVCSGPRLPNA

SEQ ID NO: 10536 - protein, 90 aa, Artificial Sequence
  Inferred translation product
VTLYCFVAVRFWRGFLDASAADFLVTVWPCCCWPLPETLLSSWFNLSSSNSARAVSPPPLAIRAGEFPLLLPGVEFLELPRLRDEEREEA

SEQ ID NO: 10537 - protein, 8 aa, Artificial Sequence
  Inferred translation product
LPPLLPSA

SEQ ID NO: 10538 - protein, 8 aa, Artificial Sequence
  Inferred translation product
KPFGNVVP

SEQ ID NO: 10539 - protein, 39 aa, Artificial Sequence
  Inferred translation product
GSCSTVAALLLGLRVPMWSLGVFKAPSVATHTMPSLLAP

SEQ ID NO: 10540 - protein, 10 aa, Artificial Sequence
  Inferred translation product
GSEASGPVPR

SEQ ID NO: 10541 - protein, 23 aa, Artificial Sequence
  Inferred translation product
KYHLGLSSFILPSPPRTRRVALR

SEQ ID NO: 10542 - protein, 27 aa, Artificial Sequence
  Inferred translation product
PIWSSGPLLVLIGTPWPRGNLSSSLPC

SEQ ID NO: 10543 - protein, 34 aa, Artificial Sequence
  Inferred translation product
VRAVNQDAILLGKPWGRRCFGLAPLQSSILVIVS

SEQ ID NO: 10544 - protein, 15 aa, Artificial Sequence
  Inferred translation product
ICGSTKCNAGGTTLV

SEQ ID NO: 10545 - protein, 12 aa, Artificial Sequence
  Inferred translation product
LGSIIRHFNLFV

SEQ ID NO: 10546 - protein, 16 aa, Artificial Sequence
  Inferred translation product
RTDLQEIEVGWLFLGR

SEQ ID NO: 10547 - protein, 16 aa, Artificial Sequence
  Inferred translation product
GKLCNLRPNVCNQFLV

SEQ ID NO: 10548 - protein, 21 aa, Artificial Sequence
  Inferred translation product
LGLGPRNFLGFVLDHVSQMLE

SEQ ID NO: 10549 - protein, 14 aa, Artificial Sequence
  Inferred translation product
RCTVLWQYVFGEAF

SEQ ID NO: 10550 - protein, 7 aa, Artificial Sequence
  Inferred translation product
MPQQQIS

SEQ ID NO: 10551 - protein, 34 aa, Artificial Sequence
  Inferred translation product
QFGLVVVGLYQKLCSQAGSICLAAIARGQFHHLR

SEQ ID NO: 10552 - protein, 59 aa, Artificial Sequence
  Inferred translation product
PFEQENFPYCCQELNFLNYRDYVMRSEKRLDCRLCFPLRRSLLAMLFLEEVVARWQHCY

SEQ ID NO: 10553 - protein, 25 aa, Artificial Sequence
  Inferred translation product
DCGCQCGLWVYSRLPQLQPIRCLLC

SEQ ID NO: 10554 - protein, 20 aa, Artificial Sequence
  Inferred translation product
RRREVKLLGQFLGNRSTIWG

SEQ ID NO: 10555 - protein, 13 aa, Artificial Sequence
  Inferred translation product
ALSFCRHHHELVG

SEQ ID NO: 10556 - protein, 15 aa, Artificial Sequence
  Inferred translation product
LFGSSQFGHLDHYWC

SEQ ID NO: 10557 - protein, 9 aa, Artificial Sequence
  Inferred translation product
LERPGLEGI

SEQ ID NO: 10558 - protein, 7 aa, Artificial Sequence
  Inferred translation product
VPPCHAE

SEQ ID NO: 10559 - protein, 79 aa, Artificial Sequence
  Inferred translation product
TKTQYYWVNLGVGAVLALPHCSPPFWLLSVESVGPPNVMRGALRWFDWGPLSDILICSFREQIYKRSRLVGFSWVGKNL

SEQ ID NO: 10560 - protein, 17 aa, Artificial Sequence
  Inferred translation product
ANCAICGPMFVISSLSD

SEQ ID NO: 10561 - protein, 66 aa, Artificial Sequence
  Inferred translation product
VLVPEISLGLFWTTSPKCLSDVVLFCGSTFLARLFRCLSSRFLSDSLALLLLAFTRNFALKLVQSV

SEQ ID NO: 10562 - protein, 23 aa, Artificial Sequence
  Inferred translation product
REGSFTTSASHSSRRISPTAARS

SEQ ID NO: 10563 - protein, 5 aa, Artificial Sequence
  Inferred translation product
ITATT

SEQ ID NO: 10564 - protein, 27 aa, Artificial Sequence
  Inferred translation product
GARRGLTAASASLCVEAFWQCCSLRKL

SEQ ID NO: 10565 - protein, 38 aa, Artificial Sequence
  Inferred translation product
HGGSIVIRIAGANVVFGCIQGSLSCNPYDAFFVSAVGK

SEQ ID NO: 10566 - protein, 6 aa, Artificial Sequence
  Inferred translation product
SFWASS

SEQ ID NO: 10567 - protein, 67 aa, Artificial Sequence
  Inferred translation product
VIEVPSGAELFHFAVTTTNSSGSSSVVANLVIWTTIGVDWNALASRESKFLLAMLSESCEPRRNIIG

SEQ ID NO: 10568 - protein, 29 aa, Artificial Sequence
  Inferred translation product
TLGSALFWPCPIAVLHSGYCQLNLWVHQM

SEQ ID NO: 10569 - protein, 16 aa, Artificial Sequence
  Inferred translation product
CGGHYVGLIGVHYQTF

SEQ ID NO: 10570 - protein, 19 aa, Artificial Sequence
  Inferred translation product
FVRLENRSTRDRGWLAFPG

SEQ ID NO: 10571 - protein, 307 aa, SARS coronavirus
MDPNQTNVVPPALHLVDPQIQLTITRMEDCNGARPKQRRPQGLPNNIASWFTALTQHGKEELRFPRGQGVPINTNSGPDDQIGYYRRATRRVRGGDGKMKELSPRWYFYYLGTGPEASLPYGANKEGIVWVATEGALNTPKDHIGTRNPNNNAATVLQLPQGTTLPKGFYAEGSRGGSQASSRSSSRSRGNSRNSTPGSSRGNSPARMASGGGETALALLLLDRLNQLESKVSGKGQQQQGQTVTKKSAAEASKKPRQKRTATKQYNVTQAFGRRGPEQTQGNFGDQDLIRQGTDYKHWAANCTICL

SEQ ID NO: 10572 - protein, 281 aa, SARS coronavirus
MEDCNGARPKQRRPQGLPNNIASWFTALTQHGKEELRFPRGQGVPINTNSGPDDQIGYYRRATRRVRGGDGKMKELSPRWYFYYLGTGPEASLPYGANKEGIVWVATEGALNTPKDHIGTRNPNNNAATVLQLPQGTTLPKGFYAEGSRGGSQASSRSSSRSRGNSRNSTPGSSRGNSPARMASGGGETALALLLLDRLNQLESKVSGKGQQQQGQTVTKKSAAEASKKPRQKRTATKQYNVTQAFGRRGPEQTQGNFGDQDLIRQGTDYKHWAANCTICL

SEQ ID NO: 10573 - protein, 209 aa, SARS coronavirus
MKELSPRWYFYYLGTGPEASLPYGANKEGIVWVATEGALNTPKDHIGTRNPNNNAATVLQLPQGTTLPKGFYAEGSRGGSQASSRSSSRSRGNSRNSTPGSSRGNSPARMASGGGETALALLLLDRLNQLESKVSGKGQQQQGQTVTKKSAAEASKKPRQKRTATKQYNVTQAFGRRGPEQTQGNFGDQDLIRQGTDYKHWAANCTICL

SEQ ID NO: 10574 - protein, 100 aa, SARS coronavirus
MASGGGETALALLLLDRLNQLESKVSGKGQQQQGQTVTKKSAAEASKKPRQKRTATKQYNVTQAFGRRGPEQTQGNFGDQDLIRQGTDYKHWAANCTICL

SEQ ID NO: 10575 - protein, 74 aa, SARS coronavirus; identical to SEQ ID NO: 10509

SEQ ID NO: 10576 - protein, 68 aa, SARS coronavirus
MGQGQNSADPKVYPIILRLGSQLSLSMARRNLDSLEARAFQSTPIVVQMTKLATTEELPDEFVVVTAK

SEQ ID NO: 10577 - protein, 84 aa, SARS coronavirus; identical to SEQ ID NO: 10512

SEQ ID NO: 10578 - protein, 70 aa, SARS coronavirus
MLPPCYNFLKEQHCQKASTQREAEAAVKPLLAPHHVVAVIQEIQLLAAVGEILLLEWLAEVVKLPSRYCC

SEQ ID NO: 10579 - protein, 41 aa, SARS coronavirus
MRGALRWFDWGPLSDILICSFREQIYKRSRLVGFSWVGKNL

SEQ ID NO: 10580 - DNA, 18 bp, Artificial Sequence
  Primer
cctcatcacgtagtcgcg

SEQ ID NO: 10581 - DNA, 16 bp, Artificial Sequence
  Primer
cacttccctacggcgc

SEQ ID NO: 10582 - DNA, 15 bp, Artificial Sequence
  Primer
acttccctacggcgc

SEQ ID NO: 10583 - DNA, 15 bp, Artificial Sequence
  Primer
actgccctcgcgcta

SEQ ID NO: 10584 - DNA, 17 bp, Artificial Sequence
  Primer
tctcctgctcgaatggc

SEQ ID NO: 10585 - DNA, 16 bp, Artificial Sequence
  Primer
ctcctgctcgaatggc

SEQ ID NO: 10586 - DNA, 15 bp, Artificial Sequence
  Primer
gtgccccccgcatta

SEQ ID NO: 10587 - DNA, 22 bp, Artificial Sequence
  Primer
actgccacaaaacagtacaacg

SEQ ID NO: 10588 - DNA, 21 bp, Artificial Sequence
  Primer
ctgccacaaaacagtacaacg

SEQ ID NO: 10589 - DNA, 20 bp, Artificial Sequence
  Primer
tgccacaaaacagtacaacg

SEQ ID NO: 10590 - DNA, 17 bp, Artificial Sequence
  Primer
catcacgtagtcgcggt

SEQ ID NO: 10591 - DNA, 16 bp, Artificial Sequence
  Primer
tcacttccctacggcg

SEQ ID NO: 10592 - DNA, 17 bp, Artificial Sequence
  Primer
ttcacttccctacggcg

SEQ ID NO: 10593 - DNA, 18 bp, Artificial Sequence
  Primer
cttcacttccctacggcg

SEQ ID NO: 10594 - DNA, 15 bp, Artificial Sequence
  Primer
gccctcgcgctattg

SEQ ID NO: 10595 - DNA, 19 bp, Artificial Sequence
  Primer
ctcctcatcacgtagtcgc

SEQ ID NO: 10596 - DNA, 20 bp, Artificial Sequence
  Primer
acaaagaaggcatcgtatgg

SEQ ID NO: 10597 - DNA, 19 bp, Artificial Sequence
  Primer
caaagaaggcatcgtatgg

SEQ ID NO: 10598 - DNA, 18 bp, Artificial Sequence
  Primer
tcctcatcacgtagtcgc

SEQ ID NO: 10599 - DNA, 18 bp, Artificial Sequence
  Primer
tcgccaaaaacgtactgc

SEQ ID NO: 10600 - DNA, 17 bp, Artificial Sequence
  Primer
cgccaaaaacgtactgc

SEQ ID NO: 10601 - DNA, 18 bp, Artificial Sequence
  Primer
gccaaaaggcttctacgc

SEQ ID NO: 10602 - DNA, 19 bp, Artificial Sequence
  Primer
ctcgccaaaaacgtactgc

SEQ ID NO: 10603 - DNA, 17 bp, Artificial Sequence
  Primer
cgaagagctacccgacg

SEQ ID NO: 10604 - DNA, 18 bp, Artificial Sequence
  Primer
gaagagctacccgacgag

SEQ ID NO: 10605 - DNA, 15 bp, Artificial Sequence
  Primer
tgccccccgcattac

SEQ ID NO: 10606 - DNA, 20 bp, Artificial Sequence
  Primer
ccaatcaaaccaacgtagtg

SEQ ID NO: 10607 - DNA, 19 bp, Artificial Sequence
  Primer
tcacgtagtcgcggtaatt

SEQ ID NO: 10608 - DNA, 18 bp, Artificial Sequence
  Primer
ctcatcacgtagtcgcgg

SEQ ID NO: 10609 - DNA, 17 bp, Artificial Sequence
  Primer
tcatcacgtagtcgcgg

SEQ ID NO: 10610 - DNA, 15 bp, Artificial Sequence
  Primer
ctgccctcgcgctat

SEQ ID NO: 10611 - DNA, 19 bp, Artificial Sequence
  Primer
atcacgtagtcgcggtaat

SEQ ID NO: 10612 - DNA, 15 bp, Artificial Sequence
  Primer
tgccctcgcgctatt

SEQ ID NO: 10613 - DNA, 19 bp, Artificial Sequence
  Primer
ccaaattggctactaccga

SEQ ID NO: 10614 - DNA, 20 bp, Artificial Sequence
  Primer
accaaattggctactaccga

SEQ ID NO: 10615 - DNA, 15 bp, Artificial Sequence
  Primer
ttggcacccgcaatc

SEQ ID NO: 10616 - DNA, 17 bp, Artificial Sequence
  Primer
tgctcgaatggctagcg

SEQ ID NO: 10617 - DNA, 23 bp, Artificial Sequence
  Primer
aaggtttacccaataatattgcg

SEQ ID NO: 10618 - DNA, 22 bp, Artificial Sequence
  Primer
aggtttacccaataatattgcg

SEQ ID NO: 10619 - DNA, 16 bp, Artificial Sequence
  Primer
gctcgaatggctagcg

SEQ ID NO: 10620 - DNA, 21 bp, Artificial Sequence
  Primer
ggtttacccaataatattgcg

SEQ ID NO: 10621 - DNA, 19 bp, Artificial Sequence
  Primer
gctcctcatcacgtagtcg

SEQ ID NO: 10622 - DNA, 18 bp, Artificial Sequence
  Primer
attctcctgctcgaatgg

SEQ ID NO: 10623 - DNA, 19 bp, Artificial Sequence
  Primer
aattctcctgctcgaatgg

SEQ ID NO: 10624 - DNA, 15 bp, Artificial Sequence
  Primer
aactgccctcgcgct

SEQ ID NO: 10625 - DNA, 17 bp, Artificial Sequence
  Primer
ttctcctgctcgaatgg

SEQ ID NO: 10626 - DNA, 20 bp, Artificial Sequence
  Primer
caatcaaaccaacgtagtgc

SEQ ID NO: 10627 - DNA, 21 bp, Artificial Sequence
  Primer
taacaaagaaggcatcgtatg

SEQ ID NO: 10628 - DNA, 20 bp, Artificial Sequence
  Primer
aacaaagaaggcatcgtatg

SEQ ID NO: 10629 - DNA, 22 bp, Artificial Sequence
  Primer
ctaacaaagaaggcatcgtatg

SEQ ID NO: 10630 - DNA, 16 bp, Artificial Sequence
  Primer
ccacgaactcgtcggg

SEQ ID NO: 10631 - DNA, 20 bp, Artificial Sequence
  Primer
ttcttgaattaccgcgacta

SEQ ID NO: 10632 - DNA, 18 bp, Artificial Sequence
  Primer
ttctttgttagcgccgta

SEQ ID NO: 10633 - DNA, 19 bp, Artificial Sequence
  Primer
aatttcttgaattaccgcg

SEQ ID NO: 10634 - DNA, 15 bp, Artificial Sequence
  Primer
gcagcaatagcgcga

SEQ ID NO: 10635 - DNA, 16 bp, Artificial Sequence
  Primer
ctccgctagccattcg

SEQ ID NO: 10636 - DNA, 17 bp, Artificial Sequence
  Primer
cttctttgttagcgccg

SEQ ID NO: 10637 - DNA, 17 bp, Artificial Sequence
  Primer
ccaccacgaactcgtcg

SEQ ID NO: 10638 - DNA, 19 bp, Artificial Sequence
  Primer
atttcttgaattaccgcga

SEQ ID NO: 10639 - DNA, 18 bp, Artificial Sequence
  Primer
ccaccaaatgtaatgcgg

SEQ ID NO: 10640 - DNA, 21 bp, Artificial Sequence
  Primer
aatgcttgagtgacgttgtac

SEQ ID NO: 10641 - DNA, 19 bp, Artificial Sequence
  Primer
tttcttgaattaccgcgac

SEQ ID NO: 10642 - DNA, 17 bp, Artificial Sequence
  Primer
tgcttccctctgcgtag

SEQ ID NO: 10643 - DNA, 19 bp, Artificial Sequence
  Primer
ttctttgttagcgccgtag

SEQ ID NO: 10644 - DNA, 20 bp, Artificial Sequence
  Primer
tcttgaattaccgcgactac

SEQ ID NO: 10645 - DNA, 18 bp, Artificial Sequence
  Primer
cagttgcaacccatacga

SEQ ID NO: 10646 - DNA, 18 bp, Artificial Sequence
  Primer
tcgggtagctcttcggta

SEQ ID NO: 10647 - DNA, 20 bp, Artificial Sequence
  Primer
tctgtctagcagcaatagcg

SEQ ID NO: 10648 - DNA, 17 bp, Artificial Sequence
  Primer
cacgaactcgtcgggta

SEQ ID NO: 10649 - DNA, 16 bp, Artificial Sequence
  Primer
accacgaactcgtcgg

SEQ ID NO: 10650 - DNA, 18 bp, Artificial Sequence
  Primer
tccaccaaatgtaatgcg

SEQ ID NO: 10651 - DNA, 23 bp, Artificial Sequence
  Primer
gagttgaatttcttgaattaccg

SEQ ID NO: 10652 - DNA, 16 bp, Artificial Sequence
  Primer
cacgaactcgtcgggt

SEQ ID NO: 10653 - DNA, 18 bp, Artificial Sequence
  Primer
gcttccctctgcgtagaa

SEQ ID NO: 10654 - DNA, 21 bp, Artificial Sequence
  Primer
gtactgttttgtggcagtacg

SEQ ID NO: 10655 - DNA, 15 bp, Artificial Sequence
  Primer
cggggggcactacgt

SEQ ID NO: 10656 - DNA, 19 bp, Artificial Sequence
  Primer
cgggtagctcttcggtagt

SEQ ID NO: 10657 - DNA, 20 bp, Artificial Sequence
  Primer
tgaatttcttgaattaccgc

SEQ ID NO: 10658 - DNA, 19 bp, Artificial Sequence
  Primer
tgtctagcagcaatagcgc

SEQ ID NO: 10659 - DNA, 15 bp, Artificial Sequence
  Primer
agcagcaatagcgcg

SEQ ID NO: 10660 - DNA, 19 bp, Artificial Sequence
  Primer
ttcttgaattaccgcgact

SEQ ID NO: 10661 - DNA, 20 bp, Artificial Sequence
  Primer
tgtgaaccaagacgcaatat

SEQ ID NO: 10662 - DNA, 20 bp, Artificial Sequence
  Primer
cattgttattaggattgcgg

SEQ ID NO: 10663 - DNA, 15 bp, Artificial Sequence
  Primer
ccacctccgctagcc

SEQ ID NO: 10664 - DNA, 17 bp, Artificial Sequence
  Primer
tgcaacccatacgatgc

SEQ ID NO: 10665 - DNA, 15 bp, Artificial Sequence
  Primer
gcggggggcactacg

SEQ ID NO: 10666 - DNA, 18 bp, Artificial Sequence
  Primer
tgaattaccgcgactacg

SEQ ID NO: 10667 - DNA, 16 bp, Artificial Sequence
  Primer
gcagcaatagcgcgag

SEQ ID NO: 10668 - DNA, 16 bp, Artificial Sequence
  Primer
tccgctagccattcga

SEQ ID NO: 10669 - DNA, 19 bp, Artificial Sequence
  Primer
tgtgaaccaagacgcaata

SEQ ID NO: 10670 - DNA, 18 bp, Artificial Sequence
  Primer
gttgcaacccatacgatg

SEQ ID NO: 10671 - DNA, 17 bp, Artificial Sequence
  Primer
cgtcaccaccacgaact

SEQ ID NO: 10672 - DNA, 17 bp, Artificial Sequence
  Primer
ttcaccacctccgctag

SEQ ID NO: 10673 - DNA, 17 bp, Artificial Sequence
  Primer
tcaccaccacgaactcg

SEQ ID NO: 10674 - DNA, 15 bp, Artificial Sequence
  Primer
tgtgcaatttgcggc

SEQ ID NO: 10675 - DNA, 19 bp, Artificial Sequence
  Primer
cagttgcaacccatacgat

SEQ ID NO: 10676 - DNA, 20 bp, Artificial Sequence
  Primer
ctgttttgtggcagtacgtt

SEQ ID NO: 10677 - DNA, 20 bp, Artificial Sequence
  Primer
actgttttgtggcagtacgt

SEQ ID NO: 10678 - DNA, 18 bp, Artificial Sequence
  Primer
gctgtgaaccaagacgca

SEQ ID NO: 10679 - DNA, 18 bp, Artificial Sequence
  Primer
caaattgtgcaatttgcg

SEQ ID NO: 10680 - DNA, 15 bp, Artificial Sequence
  Primer
agccaaccaacctcg

SEQ ID NO: 10681 - DNA, 15 bp, Artificial Sequence
  Primer
cggcagtcaagcctc

SEQ ID NO: 10682 - DNA, 15 bp, Artificial Sequence
  Primer
ggcttctacgcagag

SEQ ID NO: 10683 - DNA, 15 bp, Artificial Sequence
  Primer
acacccaaagaccac

SEQ ID NO: 10684 - DNA, 15 bp, Artificial Sequence
  Primer
ccgacgagttcgtgg

SEQ ID NO: 10685 - DNA, 15 bp, Artificial Sequence
  Primer
gaccacattggcacc

SEQ ID NO: 10686 - DNA, 15 bp, Artificial Sequence
  Primer
agtggtccagatgac

SEQ ID NO: 10687 - DNA, 15 bp, Artificial Sequence
  Primer
tcaactcctggcagc

SEQ ID NO: 10688 - DNA, 15 bp, Artificial Sequence
  Primer
tgggagacgtggtcc

SEQ ID NO: 10689 - DNA, 15 bp, Artificial Sequence
  Primer
tgggttgcaactgag

SEQ ID NO: 10690 - DNA, 15 bp, Artificial Sequence
  Primer
gtggtccagatgacc

SEQ ID NO: 10691 - DNA, 15 bp, Artificial Sequence
  Primer
aactcctggcagcag

SEQ ID NO: 10692 - DNA, 15 bp, Artificial Sequence
  Primer
caacgtcactcaagc

SEQ ID NO: 10693 - DNA, 15 bp, Artificial Sequence
  Primer
caaggccaaactgtc

SEQ ID NO: 10694 - DNA, 15 bp, Artificial Sequence
  Primer
aatgctgccaccgtg

SEQ ID NO: 10695 - DNA, 15 bp, Artificial Sequence
  Primer
acgagttcgtggtgg

SEQ ID NO: 10696 - DNA, 15 bp, Artificial Sequence
  Primer
ttggtggacccacag

SEQ ID NO: 10697 - DNA, 15 bp, Artificial Sequence
  Primer
atttggtggacccac

SEQ ID NO: 10698 - DNA, 15 bp, Artificial Sequence
  Primer
cccgacgagttcgtg

SEQ ID NO: 10699 - DNA, 15 bp, Artificial Sequence
  Primer
actggcccagaagct

SEQ ID NO: 10700 - DNA, 15 bp, Artificial Sequence
  Primer
aatctgctgctgagg

SEQ ID NO: 10701 - DNA, 15 bp, Artificial Sequence
  Primer
tacccgacgagttcg

SEQ ID NO: 10702 - DNA, 15 bp, Artificial Sequence
  Primer
aagccaaccaacctc

SEQ ID NO: 10703 - DNA, 15 bp, Artificial Sequence
  Primer
tcacgtagtcgcggt

SEQ ID NO: 10704 - DNA, 15 bp, Artificial Sequence
  Primer
gttcgtggtggtgac

SEQ ID NO: 10705 - DNA, 15 bp, Artificial Sequence
  Primer
ctcctgctcgaatgg

SEQ ID NO: 10706 - DNA, 15 bp, Artificial Sequence
  Primer
ttgggagacgtggtc

SEQ ID NO: 10707 - DNA, 15 bp, Artificial Sequence
  Primer
tggtgaaactgccct

SEQ ID NO: 10708 - DNA, 15 bp, Artificial Sequence
  Primer
aggccaaactgtcac

SEQ ID NO: 10709 - DNA, 15 bp, Artificial Sequence
  Primer
cgtcttggttcacag

SEQ ID NO: 10710 - DNA, 15 bp, Artificial Sequence
  Primer
ttccctcgaggccag

SEQ ID NO: 10711 - DNA, 15 bp, Artificial Sequence
  Primer
aaccagcttgagagc

SEQ ID NO: 10712 - DNA, 15 bp, Artificial Sequence
  Primer
tcactcagcatggca

SEQ ID NO: 10713 - DNA, 15 bp, Artificial Sequence
  Primer
acccgacgagttcgt

SEQ ID NO: 10714 - DNA, 15 bp, Artificial Sequence
  Primer
ctcatcacgtagtcg

SEQ ID NO: 10715 - DNA, 15 bp, Artificial Sequence
  Primer
tgctgctgaggcatc

SEQ ID NO: 10716 - DNA, 15 bp, Artificial Sequence
  Primer
aagagctacccgacg

SEQ ID NO: 10717 - DNA, 15 bp, Artificial Sequence
  Primer
agaccacattggcac

SEQ ID NO: 10718 - DNA, 15 bp, Artificial Sequence
  Primer
aactggcccagaagc

SEQ ID NO: 10719 - DNA, 15 bp, Artificial Sequence
  Primer
accagcttgagagca

SEQ ID NO: 10720 - DNA, 15 bp, Artificial Sequence
  Primer
aggtggtgaaactgc

SEQ ID NO: 10721 - DNA, 15 bp, Artificial Sequence
  Primer
caaaacagcgccgac

SEQ ID NO: 10722 - DNA, 15 bp, Artificial Sequence
  Primer
aggcatcgtatgggt

SEQ ID NO: 10723 - DNA, 15 bp, Artificial Sequence
  Primer
tctgctgctgaggca

SEQ ID NO: 10724 - DNA, 15 bp, Artificial Sequence
  Primer
gagctacccgacgag

SEQ ID NO: 10725 - DNA, 15 bp, Artificial Sequence
  Primer
gacgagttcgtggtg

SEQ ID NO: 10726 - DNA, 15 bp, Artificial Sequence
  Primer
aaggcttctacgcag

SEQ ID NO: 10727 - DNA, 15 bp, Artificial Sequence
  Primer
agagctcagccccag

SEQ ID NO: 10728 - DNA, 15 bp, Artificial Sequence
  Primer
caactcctggcagca

SEQ ID NO: 10729 - DNA, 15 bp, Artificial Sequence
  Primer
gcggcagtcaagcct

SEQ ID NO: 10730 - DNA, 15 bp, Artificial Sequence
  Primer
aggcttctacgcaga

SEQ ID NO: 10731 - DNA, 15 bp, Artificial Sequence
  Primer
gagttcgtggtggtg

SEQ ID NO: 10732 - DNA, 15 bp, Artificial Sequence
  Primer
aggcggcagtcaagc

SEQ ID NO: 10733 - DNA, 15 bp, Artificial Sequence
  Primer
cgacgagttcgtggt

SEQ ID NO: 10734 - DNA, 15 bp, Artificial Sequence
  Primer
taccgaagagctacc

SEQ ID NO: 10735 - DNA, 15 bp, Artificial Sequence
  Primer
gccaaccaacctcga

SEQ ID NO: 10736 - DNA, 15 bp, Artificial Sequence
  Primer
ggaggactgcaatgg

SEQ ID NO: 10737 - DNA, 15 bp, Artificial Sequence
  Primer
ttgggccgcaaattg

SEQ ID NO: 10738 - DNA, 15 bp, Artificial Sequence
  Primer
catcgtatgggttgc

SEQ ID NO: 10739 - DNA, 15 bp, Artificial Sequence
  Primer
accccaaggtttacc

SEQ ID NO: 10740 - DNA, 15 bp, Artificial Sequence
  Primer
catttggtggaccca

SEQ ID NO: 10741 - DNA, 15 bp, Artificial Sequence
  Primer
agctctcactcagca

SEQ ID NO: 10742 - DNA, 15 bp, Artificial Sequence
  Primer
ctcagccccagatgg

SEQ ID NO: 10743 - DNA, 15 bp, Artificial Sequence
  Primer
tggcacccgcaatcc

SEQ ID NO: 10744 - DNA, 15 bp, Artificial Sequence
  Primer
actcctggcagcagt

SEQ ID NO: 10745 - DNA, 15 bp, Artificial Sequence
  Primer
tcggggaccaagacc

SEQ ID NO: 10746 - DNA, 15 bp, Artificial Sequence
  Primer
ggccgcaaattgcac

SEQ ID NO: 10747 - DNA, 15 bp, Artificial Sequence
  Primer
actgagggagccttg

SEQ ID NO: 10748 - DNA, 15 bp, Artificial Sequence
  Primer
cctgctcgaatggct

SEQ ID NO: 10749 - DNA, 15 bp, Artificial Sequence
  Primer
agagctacccgacga

SEQ ID NO: 10750 - DNA, 15 bp, Artificial Sequence
  Primer
agctacccgacgagt

SEQ ID NO: 10751 - DNA, 15 bp, Artificial Sequence
  Primer
cgagttcgtggtggt

SEQ ID NO: 10752 - DNA, 15 bp, Artificial Sequence
  Primer
ggtgaaactgccctc

SEQ ID NO: 10753 - DNA, 15 bp, Artificial Sequence
  Primer
cctcatcacgtagtc

SEQ ID NO: 10754 - DNA, 15 bp, Artificial Sequence
  Primer
gtgaaactgccctcg

SEQ ID NO: 10755 - DNA, 15 bp, Artificial Sequence
  Primer
attccctcgaggcca

SEQ ID NO: 10756 - DNA, 15 bp, Artificial Sequence
  Primer
gaccccaatcaaacc

SEQ ID NO: 10757 - DNA, 15 bp, Artificial Sequence
  Primer
tctcactcagcatgg

SEQ ID NO: 10758 - DNA, 15 bp, Artificial Sequence
  Primer
caaggccaaaacagc

SEQ ID NO: 10759 - DNA, 15 bp, Artificial Sequence
  Primer
ttcgtggtggtgacg

SEQ ID NO: 10760 - DNA, 15 bp, Artificial Sequence
  Primer
caggaaaagccaacc

SEQ ID NO: 10761 - DNA, 15 bp, Artificial Sequence
  Primer
gacgtggtccagaac

SEQ ID NO: 10762 - DNA, 15 bp, Artificial Sequence
  Primer
ctgctcgaatggcta

SEQ ID NO: 10763 - DNA, 15 bp, Artificial Sequence
  Primer
ctcgcgctattgctg

SEQ ID NO: 10764 - DNA, 15 bp, Artificial Sequence
  Primer
cgaagagctacccga

SEQ ID NO: 10765 - DNA, 15 bp, Artificial Sequence
  Primer
ccctcgcgctattgc

SEQ ID NO: 10766 - DNA, 15 bp, Artificial Sequence
  Primer
gccaccgtgctacaa

SEQ ID NO: 10767 - DNA, 15 bp, Artificial Sequence
  Primer
tgccaccgtgctaca

SEQ ID NO: 10768 - DNA, 15 bp, Artificial Sequence
  Primer
ccaccgtgctacaac

SEQ ID NO: 10769 - DNA, 15 bp, Artificial Sequence
  Primer
tcagccccagatggt

SEQ ID NO: 10770 - DNA, 15 bp, Artificial Sequence
  Primer
cccaaggtttaccca

SEQ ID NO: 10771 - DNA, 15 bp, Artificial Sequence
  Primer
gccagggcgttccaa

SEQ ID NO: 10772 - DNA, 15 bp, Artificial Sequence
  Primer
ttggcacccgcaatc

SEQ ID NO: 10773 - DNA, 15 bp, Artificial Sequence
  Primer
accagaatggaggac

SEQ ID NO: 10774 - DNA, 15 bp, Artificial Sequence
  Primer
acgtggtccagaaca

SEQ ID NO: 10775 - DNA, 15 bp, Artificial Sequence
  Primer
tgcgtcttggttcac

SEQ ID NO: 10776 - DNA, 15 bp, Artificial Sequence
  Primer
ctcagcatggcaagg

SEQ ID NO: 10777 - DNA, 15 bp, Artificial Sequence
  Primer
ggcatcgtatgggtt

SEQ ID NO: 10778 - DNA, 15 bp, Artificial Sequence
  Primer
cctacggcgctaaca

SEQ ID NO: 10779 - DNA, 15 bp, Artificial Sequence
  Primer
ttcaactcctggcag

SEQ ID NO: 10780 - DNA, 15 bp, Artificial Sequence
  Primer
gctgctgaggcatct

SEQ ID NO: 10781 - DNA, 15 bp, Artificial Sequence
  Primer
ccaaaacagcgccga

SEQ ID NO: 10782 - DNA, 15 bp, Artificial Sequence
  Primer
gggccgcaaattgca

SEQ ID NO: 10783 - DNA, 15 bp, Artificial Sequence
  Primer
cacgtagtcgcggta

SEQ ID NO: 10784 - DNA, 15 bp, Artificial Sequence
  Primer
tggaggactgcaatg

SEQ ID NO: 10785 - DNA, 15 bp, Artificial Sequence
  Primer
cattggcacccgcaa

SEQ ID NO: 10786 - DNA, 15 bp, Artificial Sequence
  Primer
tgcaactgagggagc

SEQ ID NO: 10787 - DNA, 15 bp, Artificial Sequence
  Primer
gctacccgacgagtt

SEQ ID NO: 10788 - DNA, 15 bp, Artificial Sequence
  Primer
gtcttggttcacagc

SEQ ID NO: 10789 - DNA, 15 bp, Artificial Sequence
  Primer
agcatttgggagacg

SEQ ID NO: 10790 - DNA, 15 bp, Artificial Sequence
  Primer
ctacccaggaaaagc

SEQ ID NO: 10791 - DNA, 15 bp, Artificial Sequence
  Primer
tggttcacagctctc

SEQ ID NO: 10792 - DNA, 15 bp, Artificial Sequence
  Primer
ccctacggcgctaac

SEQ ID NO: 10793 - DNA, 15 bp, Artificial Sequence
  Primer
tggacccacagattc

SEQ ID NO: 10794 - DNA, 15 bp, Artificial Sequence
  Primer
tggctagcggaggtg

SEQ ID NO: 10795 - DNA, 15 bp, Artificial Sequence
  Primer
gaagagctacccgac

SEQ ID NO: 10796 - DNA, 15 bp, Artificial Sequence
  Primer
tggctactaccgaag

SEQ ID NO: 10797 - DNA, 15 bp, Artificial Sequence
  Primer
tcctggcagcagtag

SEQ ID NO: 10798 - DNA, 15 bp, Artificial Sequence
  Primer
cctggcagcagtagg

SEQ ID NO: 10799 - DNA, 15 bp, Artificial Sequence
  Primer
tcgcgctattgctgc

SEQ ID NO: 10800 - DNA, 15 bp, Artificial Sequence
  Primer
ctacccgacgagttc

SEQ ID NO: 10801 - DNA, 15 bp, Artificial Sequence
  Primer
caaccaacctcgatc

SEQ ID NO: 10802 - DNA, 15 bp, Artificial Sequence
  Primer
agcatggcaaggagg

SEQ ID NO: 10803 - DNA, 15 bp, Artificial Sequence
  Primer
cgctattgctgctag

SEQ ID NO: 10804 - DNA, 15 bp, Artificial Sequence
  Primer
accaacctcgatctc

SEQ ID NO: 10805 - DNA, 15 bp, Artificial Sequence
  Primer
tctcctgctcgaatg

SEQ ID NO: 10806 - DNA, 15 bp, Artificial Sequence
  Primer
gccgaccccaaggtt

SEQ ID NO: 10807 - DNA, 15 bp, Artificial Sequence
  Primer
ctaggaactggccca

SEQ ID NO: 10808 - DNA, 15 bp, Artificial Sequence
  Primer
agaatggaggactgc

SEQ ID NO: 10809 - DNA, 15 bp, Artificial Sequence
  Primer
tcgctcctcatcacg

SEQ ID NO: 10810 - DNA, 15 bp, Artificial Sequence
  Primer
ctacggcgctaacaa

SEQ ID NO: 10811 - DNA, 15 bp, Artificial Sequence
  Primer
tttggtggacccaca

SEQ ID NO: 10812 - DNA, 15 bp, Artificial Sequence
  Primer
ctgctgctgaggcat

SEQ ID NO: 10813 - DNA, 15 bp, Artificial Sequence
  Primer
tcaagcctcttctcg

SEQ ID NO: 10814 - DNA, 15 bp, Artificial Sequence
  Primer
gggttgcaactgagg

SEQ ID NO: 10815 - DNA, 15 bp, Artificial Sequence
  Primer
agacgtggtccagaa

SEQ ID NO: 10816 - DNA, 15 bp, Artificial Sequence
  Primer
gaaggcatcgtatgg

SEQ ID NO: 10817 - DNA, 15 bp, Artificial Sequence
  Primer
gctgccaccgtgcta

SEQ ID NO: 10818 - DNA, 15 bp, Artificial Sequence
  Primer
cagggcgttccaatc

SEQ ID NO: 10819 - DNA, 15 bp, Artificial Sequence
  Primer
ctgccaccgtgctac

SEQ ID NO: 10820 - DNA, 15 bp, Artificial Sequence
  Primer
tcacagctctcactc

SEQ ID NO: 10821 - DNA, 15 bp, Artificial Sequence
  Primer
caccaatagtggtcc

SEQ ID NO: 10822 - DNA, 15 bp, Artificial Sequence
  Primer
aggaactggcccaga

SEQ ID NO: 10823 - DNA, 15 bp, Artificial Sequence
  Primer
agcctcttctcgctc

SEQ ID NO: 10824 - DNA, 15 bp, Artificial Sequence
  Primer
tggtggacccacaga

SEQ ID NO: 10825 - DNA, 15 bp, Artificial Sequence
  Primer
agagggaagcagagg

SEQ ID NO: 10826 - DNA, 15 bp, Artificial Sequence
  Primer
agcctcgccaaaaac

SEQ ID NO: 10827 - DNA, 15 bp, Artificial Sequence
  Primer
cttccctacggcgct

SEQ ID NO: 10828 - DNA, 15 bp, Artificial Sequence
  Primer
cttggttcacagctc

SEQ ID NO: 10829 - DNA, 15 bp, Artificial Sequence
  Primer
agggcgttccaatca

SEQ ID NO: 10830 - DNA, 15 bp, Artificial Sequence
  Primer
aatggctagcggagg

SEQ ID NO: 10831 - DNA, 15 bp, Artificial Sequence
  Primer
gcgtcttggttcaca

SEQ ID NO: 10832 - DNA, 15 bp, Artificial Sequence
  Primer
actcagcatggcaag

SEQ ID NO: 10833 - DNA, 15 bp, Artificial Sequence
  Primer
gaaccagcttgagag

SEQ ID NO: 10834 - DNA, 15 bp, Artificial Sequence
  Primer
cccagaagcttcact

SEQ ID NO: 10835 - DNA, 15 bp, Artificial Sequence
  Primer
ggcgttccaatcaac

SEQ ID NO: 10836 - DNA, 15 bp, Artificial Sequence
  Primer
gcacccgcaatccta

SEQ ID NO: 10837 - DNA, 15 bp, Artificial Sequence
  Primer
gaccccaaggtttac

SEQ ID NO: 10838 - DNA, 15 bp, Artificial Sequence
  Primer
ggttcacagctctca

SEQ ID NO: 10839 - DNA, 15 bp, Artificial Sequence
  Primer
gcatcgtatgggttg

SEQ ID NO: 10840 - DNA, 15 bp, Artificial Sequence
  Primer
aactgagggagcctt

SEQ ID NO: 10841 - DNA, 15 bp, Artificial Sequence
  Primer
gttcacagctctcac

SEQ ID NO: 10842 - DNA, 15 bp, Artificial Sequence
  Primer
ttgcaactgagggag

SEQ ID NO: 10843 - DNA, 15 bp, Artificial Sequence
  Primer
gctcagccccagatg

SEQ ID NO: 10844 - DNA, 15 bp, Artificial Sequence
  Primer
ctgagggagccttga

SEQ ID NO: 10845 - DNA, 15 bp, Artificial Sequence
  Primer
agaggcggcagtcaa

SEQ ID NO: 10846 - DNA, 15 bp, Artificial Sequence
  Primer
gggaaattctcctgc

SEQ ID NO: 10847 - DNA, 15 bp, Artificial Sequence
  Primer
tgagggagccttgaa

SEQ ID NO: 10848 - DNA, 15 bp, Artificial Sequence
  Primer
ctactaccgaagagc

SEQ ID NO: 10849 - DNA, 15 bp, Artificial Sequence
  Primer
cagcatggcaaggag

SEQ ID NO: 10850 - DNA, 15 bp, Artificial Sequence
  Primer
gtcaagcctcttctc

SEQ ID NO: 10851 - DNA, 15 bp, Artificial Sequence
  Primer
agctcagccccagat

SEQ ID NO: 10852 - DNA, 15 bp, Artificial Sequence
  Primer
ggtggacccacagat

SEQ ID NO: 10853 - DNA, 15 bp, Artificial Sequence
  Primer
aacaatgctgccacc

SEQ ID NO: 10854 - DNA, 15 bp, Artificial Sequence
  Primer
gcgctattgctgcta

SEQ ID NO: 10855 - DNA, 15 bp, Artificial Sequence
  Primer
tacgcagagggaagc

SEQ ID NO: 10856 - DNA, 15 bp, Artificial Sequence
  Primer
cctcgccaaaaacgt

SEQ ID NO: 10857 - DNA, 15 bp, Artificial Sequence
  Primer
ccaaccaacctcgat

SEQ ID NO: 10858 - DNA, 15 bp, Artificial Sequence
  Primer
ggaccccaatcaaac

SEQ ID NO: 10859 - DNA, 15 bp, Artificial Sequence
  Primer
gccctcgcgctattg

SEQ ID NO: 10860 - DNA, 15 bp, Artificial Sequence
  Primer
cgcagagggaagcag

SEQ ID NO: 10861 - DNA, 15 bp, Artificial Sequence
  Primer
ctagcggaggtggtg

SEQ ID NO: 10862 - DNA, 15 bp, Artificial Sequence
  Primer
cggggaccaagacct

SEQ ID NO: 10863 - DNA, 15 bp, Artificial Sequence
  Primer
gaggtggtgaaactg

SEQ ID NO: 10864 - DNA, 15 bp, Artificial Sequence
  Primer
tgctcgaatggctag

SEQ ID NO: 10865 - DNA, 15 bp, Artificial Sequence
  Primer
caatgctgccaccgt

SEQ ID NO: 10866 - DNA, 15 bp, Artificial Sequence
  Primer
cccagatggtacttc

SEQ ID NO: 10867 - DNA, 15 bp, Artificial Sequence
  Primer
ttctacgcagaggga

SEQ ID NO: 10868 - DNA, 15 bp, Artificial Sequence
  Primer
cagctctcactcagc

SEQ ID NO: 10869 - DNA, 15 bp, Artificial Sequence
  Primer
aagcagaggcggcag

SEQ ID NO: 10870 - DNA, 15 bp, Artificial Sequence
  Primer
caactgagggagcct

SEQ ID NO: 10871 - DNA, 15 bp, Artificial Sequence
  Primer
ggaactggcccagaa

SEQ ID NO: 10872 - DNA, 15 bp, Artificial Sequence
  Primer
tgctgccaccgtgct

SEQ ID NO: 10873 - DNA, 15 bp, Artificial Sequence
  Primer
agccccagatggtac

SEQ ID NO: 10874 - DNA, 15 bp, Artificial Sequence
  Primer
gcctcttctcgctcc

SEQ ID NO: 10875 - DNA, 15 bp, Artificial Sequence
  Primer
gcatttgggagacgt

SEQ ID NO: 10876 - DNA, 15 bp, Artificial Sequence
  Primer
ggcacccgcaatcct

SEQ ID NO: 10877 - DNA, 15 bp, Artificial Sequence
  Primer
ctcgctcctcatcac

SEQ ID NO: 10878 - DNA, 15 bp, Artificial Sequence
  Primer
acagctctcactcag

SEQ ID NO: 10879 - DNA, 15 bp, Artificial Sequence
  Primer
acccaggaaaagcca

SEQ ID NO: 10880 - DNA, 15 bp, Artificial Sequence
  Primer
gcctcgccaaaaacg

SEQ ID NO: 10881 - DNA, 15 bp, Artificial Sequence
  Primer
cagagggaagcagag

SEQ ID NO: 10882 - DNA, 15 bp, Artificial Sequence
  Primer
acgcagagggaagca

SEQ ID NO: 10883 - DNA, 15 bp, Artificial Sequence
  Primer
ctgctgaggcatcta

SEQ ID NO: 10884 - DNA, 15 bp, Artificial Sequence
  Primer
ctcttctcgctcctc

SEQ ID NO: 10885 - DNA, 15 bp, Artificial Sequence
  Primer
ggcccagaagcttca

SEQ ID NO: 10886 - DNA, 15 bp, Artificial Sequence
  Primer
ttcggggaccaagac

SEQ ID NO: 10887 - DNA, 15 bp, Artificial Sequence
  Primer
tttgggagacgtggt

SEQ ID NO: 10888 - DNA, 15 bp, Artificial Sequence
  Primer
gaaatttcggggacc

SEQ ID NO: 10889 - DNA, 15 bp, Artificial Sequence
  Primer
ggtccagaacaaacc

SEQ ID NO: 10890 - DNA, 15 bp, Artificial Sequence
  Primer
ggccaaactgtcact

SEQ ID NO: 10891 - DNA, 15 bp, Artificial Sequence
  Primer
ttccctacggcgcta

SEQ ID NO: 10892 - DNA, 15 bp, Artificial Sequence
  Primer
cactcagcatggcaa

SEQ ID NO: 10893 - DNA, 15 bp, Artificial Sequence
  Primer
gccgcaaattgcaca

SEQ ID NO: 10894 - DNA, 15 bp, Artificial Sequence
  Primer
ctcctggcagcagta

SEQ ID NO: 10895 - DNA, 15 bp, Artificial Sequence
  Primer
catttgggagacgtg

SEQ ID NO: 10896 - DNA, 15 bp, Artificial Sequence
  Primer
gagctcagccccaga

SEQ ID NO: 10897 - DNA, 15 bp, Artificial Sequence
  Primer
cgaatggctagcgga

SEQ ID NO: 10898 - DNA, 15 bp, Artificial Sequence
  Primer
cagaggcggcagtca

SEQ ID NO: 10899 - DNA, 15 bp, Artificial Sequence
  Primer
tgcaatggggcaagg

SEQ ID NO: 10900 - DNA, 15 bp, Artificial Sequence
  Primer
gctactaccgaagag

SEQ ID NO: 10901 - DNA, 15 bp, Artificial Sequence
  Primer
ggacccacagattca

SEQ ID NO: 10902 - DNA, 15 bp, Artificial Sequence
  Primer
cacccaaagaccaca

SEQ ID NO: 10903 - DNA, 15 bp, Artificial Sequence
  Primer
gctctcactcagcat

SEQ ID NO: 10904 - DNA, 15 bp, Artificial Sequence
  Primer
ggaggtggtgaaact

SEQ ID NO: 10905 - DNA, 15 bp, Artificial Sequence
  Primer
gttgcaactgaggga

SEQ ID NO: 10906 - DNA, 15 bp, Artificial Sequence
  Primer
atggctagcggaggt

SEQ ID NO: 10907 - DNA, 15 bp, Artificial Sequence
  Primer
cgtgctacaacttcc

SEQ ID NO: 10908 - DNA, 15 bp, Artificial Sequence
  Primer
gaatggaggactgca

SEQ ID NO: 10909 - DNA, 15 bp, Artificial Sequence
  Primer
aagagctcagcccca

SEQ ID NO: 10910 - DNA, 15 bp, Artificial Sequence
  Primer
gaatggctagcggag

SEQ ID NO: 10911 - DNA, 15 bp, Artificial Sequence
  Primer
cgctcctcatcacgt

SEQ ID NO: 10912 - DNA, 15 bp, Artificial Sequence
  Primer
ccccagatggtactt

SEQ ID NO: 10913 - DNA, 15 bp, Artificial Sequence
  Primer
caccgtgctacaact

SEQ ID NO: 10914 - DNA, 15 bp, Artificial Sequence
  Primer
ccagcttgagagcaa

SEQ ID NO: 10915 - DNA, 15 bp, Artificial Sequence
  Primer
cgtggtccagaacaa

SEQ ID NO: 10916 - DNA, 15 bp, Artificial Sequence
  Primer
gcatggcaaggagga

SEQ ID NO: 10917 - DNA, 15 bp, Artificial Sequence
  Primer
cctcgcgctattgct

SEQ ID NO: 10918 - DNA, 15 bp, Artificial Sequence
  Primer
gaactggcccagaag

SEQ ID NO: 10919 - DNA, 15 bp, Artificial Sequence
  Primer
cgcgctattgctgct

SEQ ID NO: 10920 - DNA, 15 bp, Artificial Sequence
  Primer
gctagcggaggtggt

SEQ ID NO: 10921 - DNA, 15 bp, Artificial Sequence
  Primer
tctacgcagagggaa

SEQ ID NO: 10922 - DNA, 15 bp, Artificial Sequence
  Primer
aagcctcttctcgct

SEQ ID NO: 10923 - DNA, 15 bp, Artificial Sequence
  Primer
gcagtcaagcctctt

SEQ ID NO: 10924 - DNA, 15 bp, Artificial Sequence
  Primer
gtggtggtgacggca

SEQ ID NO: 10925 - DNA, 15 bp, Artificial Sequence
  Primer
tggtggtgacggcaa

SEQ ID NO: 10926 - DNA, 15 bp, Artificial Sequence
  Primer
ggaaatttcggggac

SEQ ID NO: 10927 - DNA, 15 bp, Artificial Sequence
  Primer
ggcagcagtagggga

SEQ ID NO: 10928 - DNA, 15 bp, Artificial Sequence
  Primer
gaagcagaggcggca

SEQ ID NO: 10929 - DNA, 15 bp, Artificial Sequence
  Primer
cagtcaagcctcttc

SEQ ID NO: 10930 - DNA, 15 bp, Artificial Sequence
  Primer
ggctactaccgaaga

SEQ ID NO: 10931 - DNA, 15 bp, Artificial Sequence
  Primer
cttcacttccctacg

SEQ ID NO: 10932 - DNA, 15 bp, Artificial Sequence
  Primer
ggggaaattctcctg

SEQ ID NO: 10933 - DNA, 15 bp, Artificial Sequence
  Primer
cagaatggaggactg

SEQ ID NO: 10934 - DNA, 15 bp, Artificial Sequence
  Primer
gggcaaggccaaaac

SEQ ID NO: 10935 - DNA, 15 bp, Artificial Sequence
  Primer
atttgggagacgtgg

SEQ ID NO: 10936 - DNA, 15 bp, Artificial Sequence
  Primer
ctacgcagagggaag

SEQ ID NO: 10937 - DNA, 15 bp, Artificial Sequence
  Primer
atggcaaggaggaac

SEQ ID NO: 10938 - DNA, 15 bp, Artificial Sequence
  Primer
agcggaggtggtgaa

SEQ ID NO: 10939 - DNA, 15 bp, Artificial Sequence
  Primer
actgccctcgcgcta

SEQ ID NO: 10940 - DNA, 15 bp, Artificial Sequence
  Primer
tggcaaggaggaact

SEQ ID NO: 10941 - DNA, 15 bp, Artificial Sequence
  Primer
gaggcggcagtcaag

SEQ ID NO: 10942 - DNA, 15 bp, Artificial Sequence
  Primer
gccccagatggtact

SEQ ID NO: 10943 - DNA, 15 bp, Artificial Sequence
  Primer
cctcttctcgctcct

SEQ ID NO: 10944 - DNA, 15 bp, Artificial Sequence
  Primer
cggaggtggtgaaac

SEQ ID NO: 10945 - DNA, 15 bp, Artificial Sequence
  Primer
agcagaggcggcagt

SEQ ID NO: 10946 - DNA, 15 bp, Artificial Sequence
  Primer
ctctcactcagcatg

SEQ ID NO: 10947 - DNA, 15 bp, Artificial Sequence
  Primer
ttctcgctcctcatc

SEQ ID NO: 10948 - DNA, 15 bp, Artificial Sequence
  Primer
tcttctcgctcctca

SEQ ID NO: 10949 - DNA, 15 bp, Artificial Sequence
  Primer
ggggaccaagaccta

SEQ ID NO: 10950 - DNA, 15 bp, Artificial Sequence
  Primer
ccagaatggaggact

SEQ ID NO: 10951 - DNA, 15 bp, Artificial Sequence
  Primer
cagccccagatggta

SEQ ID NO: 10952 - DNA, 15 bp, Artificial Sequence
  Primer
ctggtaaaggccaac

SEQ ID NO: 10953 - DNA, 15 bp, Artificial Sequence
  Primer
atttcggggaccaag

SEQ ID NO: 10954 - DNA, 15 bp, Artificial Sequence
  Primer
acggcgctaacaaag

SEQ ID NO: 10955 - DNA, 15 bp, Artificial Sequence
  Primer
gctcctcatcacgta

SEQ ID NO: 10956 - DNA, 15 bp, Artificial Sequence
  Primer
cctacccaggaaaag

SEQ ID NO: 10957 - DNA, 15 bp, Artificial Sequence
  Primer
ggcaaggaggaactt

SEQ ID NO: 10958 - DNA, 15 bp, Artificial Sequence
  Primer
ggcaaggccaaaaca

SEQ ID NO: 10959 - DNA, 15 bp, Artificial Sequence
  Primer
cttctcgctcctcat

SEQ ID NO: 10960 - DNA, 15 bp, Artificial Sequence
  Primer
catggcaaggaggaa

SEQ ID NO: 10961 - DNA, 15 bp, Artificial Sequence
  Primer
ggtccagatgaccaa

SEQ ID NO: 10962 - DNA, 15 bp, Artificial Sequence
  Primer
gcagagggaagcaga

SEQ ID NO: 10963 - DNA, 15 bp, Artificial Sequence
  Primer
gactgcaatggggca

SEQ ID NO: 10964 - DNA, 15 bp, Artificial Sequence
  Primer
ggtgacggcaaaatg

SEQ ID NO: 10965 - DNA, 15 bp, Artificial Sequence
  Primer
gcagcagtaggggaa

SEQ ID NO: 10966 - DNA, 15 bp, Artificial Sequence
  Primer
actgcaatggggcaa

SEQ ID NO: 10967 - DNA, 15 bp, Artificial Sequence
  Primer
ctaccgaagagctac

SEQ ID NO: 10968 - DNA, 15 bp, Artificial Sequence
  Primer
ctgcaatggggcaag

SEQ ID NO: 10969 - DNA, 15 bp, Artificial Sequence
  Primer
tttcggggaccaaga

SEQ ID NO: 10970 - DNA, 15 bp, Artificial Sequence
  Primer
ctcctcatcacgtag

SEQ ID NO: 10971 - DNA, 15 bp, Artificial Sequence
  Primer
gcttcacttccctac

SEQ ID NO: 10972 - DNA, 15 bp, Artificial Sequence
  Primer
ccaggaaaagccaac

SEQ ID NO: 10973 - DNA, 15 bp, Artificial Sequence
  Primer
tctcgctcctcatca

SEQ ID NO: 10974 - DNA, 15 bp, Artificial Sequence
  Primer
ccaacctcgatctct

SEQ ID NO: 10975 - DNA, 15 bp, Artificial Sequence
  Primer
agatgcctcagcagc

SEQ ID NO: 10976 - DNA, 15 bp, Artificial Sequence
  Primer
tgttagcgccgtagg

SEQ ID NO: 10977 - DNA, 15 bp, Artificial Sequence
  Primer
accacgaactcgtcg

SEQ ID NO: 10978 - DNA, 15 bp, Artificial Sequence
  Primer
accaccacgaactcg

SEQ ID NO: 10979 - DNA, 15 bp, Artificial Sequence
  Primer
attggaacgccctgg

SEQ ID NO: 10980 - DNA, 15 bp, Artificial Sequence
  Primer
tgtggtctttgggtg

SEQ ID NO: 10981 - DNA, 15 bp, Artificial Sequence
  Primer
tagccattcgagcag

SEQ ID NO: 10982 - DNA, 15 bp, Artificial Sequence
  Primer
gctagccattcgagc

SEQ ID NO: 10983 - DNA, 15 bp, Artificial Sequence
  Primer
cgctagccattcgag

SEQ ID NO: 10984 - DNA, 15 bp, Artificial Sequence
  Primer
agccattcgagcagg

SEQ ID NO: 10985 - DNA, 15 bp, Artificial Sequence
  Primer
gattggaacgccctg

SEQ ID NO: 10986 - DNA, 15 bp, Artificial Sequence
  Primer
gttgcaacccatacg

SEQ ID NO: 10987 - DNA, 15 bp, Artificial Sequence
  Primer
ggtgccaatgtggtc

SEQ ID NO: 10988 - DNA, 15 bp, Artificial Sequence
  Primer
acgtctcccaaatgc

SEQ ID NO: 10989 - DNA, 15 bp, Artificial Sequence
  Primer
tctgcgtagaagcct

SEQ ID NO: 10990 - DNA, 15 bp, Artificial Sequence
  Primer
cgagggcagtttcac

SEQ ID NO: 10991 - DNA, 15 bp, Artificial Sequence
  Primer
tgagagctgtgaacc

SEQ ID NO: 10992 - DNA, 15 bp, Artificial Sequence
  Primer
tactgctgccaggag

SEQ ID NO: 10993 - DNA, 15 bp, Artificial Sequence
  Primer
ttgccatgctgagtg

SEQ ID NO: 10994 - DNA, 15 bp, Artificial Sequence
  Primer
aactcgtcgggtagc

SEQ ID NO: 10995 - DNA, 15 bp, Artificial Sequence
  Primer
attaccgcgactacg

SEQ ID NO: 10996 - DNA, 15 bp, Artificial Sequence
  Primer
aatctgtgggtccac

SEQ ID NO: 10997 - DNA, 15 bp, Artificial Sequence
  Primer
taccgcgactacgtg

SEQ ID NO: 10998 - DNA, 15 bp, Artificial Sequence
  Primer
gggtttgttctggac

SEQ ID NO: 10999 - DNA, 15 bp, Artificial Sequence
  Primer
tcggcgctgttttgg

SEQ ID NO: 11000 - DNA, 15 bp, Artificial Sequence
  Primer
atgcctcagcagcag

SEQ ID NO: 11001 - DNA, 15 bp, Artificial Sequence
  Primer
gttctggaccacgtc

SEQ ID NO: 11002 - DNA, 15 bp, Artificial Sequence
  Primer
cgggtgccaatgtgg

SEQ ID NO: 11003 - DNA, 15 bp, Artificial Sequence
  Primer
tccgctagccattcg

SEQ ID NO: 11004 - DNA, 15 bp, Artificial Sequence
  Primer
tagcacggtggcagc

SEQ ID NO: 11005 - DNA, 15 bp, Artificial Sequence
  Primer
actcgtcgggtagct

SEQ ID NO: 11006 - DNA, 15 bp, Artificial Sequence
  Primer
tgctgccaggagttg

SEQ ID NO: 11007 - DNA, 15 bp, Artificial Sequence
  Primer
taggattgcgggtgc

SEQ ID NO: 11008 - DNA, 15 bp, Artificial Sequence
  Primer
ttgctctcaagctgg

SEQ ID NO: 11009 - DNA, 15 bp, Artificial Sequence
  Primer
agggcagtttcacca

SEQ ID NO: 11010 - DNA, 15 bp, Artificial Sequence
  Primer
ccttgccatgctgag

SEQ ID NO: 11011 - DNA, 15 bp, Artificial Sequence
  Primer
acgaactcgtcgggt

SEQ ID NO: 11012 - DNA, 15 bp, Artificial Sequence
  Primer
aagaggcttgactgc

SEQ ID NO: 11013 - DNA, 15 bp, Artificial Sequence
  Primer
gcgggtgccaatgtg

SEQ ID NO: 11014 - DNA, 15 bp, Artificial Sequence
  Primer
ctcgtcgggtagctc

SEQ ID NO: 11015 - DNA, 15 bp, Artificial Sequence
  Primer
atctgtgggtccacc

SEQ ID NO: 11016 - DNA, 15 bp, Artificial Sequence
  Primer
caccacgaactcgtc

SEQ ID NO: 11017 - DNA, 15 bp, Artificial Sequence
  Primer
tgtagcacggtggca

SEQ ID NO: 11018 - DNA, 15 bp, Artificial Sequence
  Primer
tgctctcaagctggt

SEQ ID NO: 11019 - DNA, 15 bp, Artificial Sequence
  Primer
tgggtccaccaaatg

SEQ ID NO: 11020 - DNA, 15 bp, Artificial Sequence
  Primer
cctactgctgccagg

SEQ ID NO: 11021 - DNA, 15 bp, Artificial Sequence
  Primer
atcgaggttggttgg

SEQ ID NO: 11022 - DNA, 15 bp, Artificial Sequence
  Primer
acccatacgatgcct

SEQ ID NO: 11023 - DNA, 15 bp, Artificial Sequence
  Primer
tgaatctgtgggtcc

SEQ ID NO: 11024 - DNA, 15 bp, Artificial Sequence
  Primer
tgttctggaccacgt

SEQ ID NO: 11025 - DNA, 15 bp, Artificial Sequence
  Primer
caccaccacgaactc

SEQ ID NO: 11026 - DNA, 15 bp, Artificial Sequence
  Primer
ccctcagttgcaacc

SEQ ID NO: 11027 - DNA, 15 bp, Artificial Sequence
  Primer
gggcactacgttggt

SEQ ID NO: 11028 - DNA, 15 bp, Artificial Sequence
  Primer
acgtttttggcgagg

SEQ ID NO: 11029 - DNA, 15 bp, Artificial Sequence
  Primer
gatgcctcagcagca

SEQ ID NO: 11030 - DNA, 15 bp, Artificial Sequence
  Primer
ttctgggccagttcc

SEQ ID NO: 11031 - DNA, 15 bp, Artificial Sequence
  Primer
ctggaccactattgg

SEQ ID NO: 11032 - DNA, 15 bp, Artificial Sequence
  Primer
agttgtagcacggtg

SEQ ID NO: 11033 - DNA, 15 bp, Artificial Sequence
  Primer
acggtggcagcattg

SEQ ID NO: 11034 - DNA, 15 bp, Artificial Sequence
  Primer
cctctgcgtagaagc

SEQ ID NO: 11035 - DNA, 15 bp, Artificial Sequence
  Primer
tagatgcctcagcag

SEQ ID NO: 11036 - DNA, 15 bp, Artificial Sequence
  Primer
agcttctgggccagt

SEQ ID NO: 11037 - DNA, 15 bp, Artificial Sequence
  Primer
atttgcggcccaatg

SEQ ID NO: 11038 - DNA, 15 bp, Artificial Sequence
  Primer
taaaccttggggtcg

SEQ ID NO: 11039 - DNA, 15 bp, Artificial Sequence
  Primer
tcgggtagctcttcg

SEQ ID NO: 11040 - DNA, 15 bp, Artificial Sequence
  Primer
ctactgctgccagga

SEQ ID NO: 11041 - DNA, 15 bp, Artificial Sequence
  Primer
cgaggttggttggct

SEQ ID NO: 11042 - DNA, 15 bp, Artificial Sequence
  Primer
actgctgccaggagt

SEQ ID NO: 11043 - DNA, 15 bp, Artificial Sequence
  Primer
tcaaggctccctcag

SEQ ID NO: 11044 - DNA, 15 bp, Artificial Sequence
  Primer
ttgcgggtgccaatg

SEQ ID NO: 11045 - DNA, 15 bp, Artificial Sequence
  Primer
accgcgactacgtga

SEQ ID NO: 11046 - DNA, 15 bp, Artificial Sequence
  Primer
gaagaggcttgactg

SEQ ID NO: 11047 - DNA, 15 bp, Artificial Sequence
  Primer
gcttgagtgacgttg

SEQ ID NO: 11048 - DNA, 15 bp, Artificial Sequence
  Primer
caacccatacgatgc

SEQ ID NO: 11049 - DNA, 15 bp, Artificial Sequence
  Primer
gagggcagtttcacc

SEQ ID NO: 11050 - DNA, 15 bp, Artificial Sequence
  Primer
tctgtgggtccacca

SEQ ID NO: 11051 - DNA, 15 bp, Artificial Sequence
  Primer
ctccttgccatgctg

SEQ ID NO: 11052 - DNA, 15 bp, Artificial Sequence
  Primer
gagaagaggcttgac

SEQ ID NO: 11053 - DNA, 15 bp, Artificial Sequence
  Primer
gtttgattggggtcc

SEQ ID NO: 11054 - DNA, 15 bp, Artificial Sequence
  Primer
ccgctagccattcga

SEQ ID NO: 11055 - DNA, 15 bp, Artificial Sequence
  Primer
ttgttagcgccgtag

SEQ ID NO: 11056 - DNA, 15 bp, Artificial Sequence
  Primer
cgcgagggcagtttc

SEQ ID NO: 11057 - DNA, 15 bp, Artificial Sequence
  Primer
tgcgggtgccaatgt

SEQ ID NO: 11058 - DNA, 15 bp, Artificial Sequence
  Primer
gggcagtttcaccac

SEQ ID NO: 11059 - DNA, 15 bp, Artificial Sequence
  Primer
ctcagttgcaaccca

SEQ ID NO: 11060 - DNA, 15 bp, Artificial Sequence
  Primer
gggtgccaatgtggt

SEQ ID NO: 11061 - DNA, 15 bp, Artificial Sequence
  Primer
ccctactgctgccag

SEQ ID NO: 11062 - DNA, 15 bp, Artificial Sequence
  Primer
tgccatgctgagtga

SEQ ID NO: 11063 - DNA, 15 bp, Artificial Sequence
  Primer
tgattggaacgccct

SEQ ID NO: 11064 - DNA, 15 bp, Artificial Sequence
  Primer
gttgtagcacggtgg

SEQ ID NO: 11065 - DNA, 15 bp, Artificial Sequence
  Primer
tgggccagttcctag

SEQ ID NO: 11066 - DNA, 15 bp, Artificial Sequence
  Primer
gtcaccaccacgaac

SEQ ID NO: 11067 - DNA, 15 bp, Artificial Sequence
  Primer
ttaccgcgactacgt

SEQ ID NO: 11068 - DNA, 15 bp, Artificial Sequence
  Primer
ccaccacgaactcgt

SEQ ID NO: 11069 - DNA, 15 bp, Artificial Sequence
  Primer
agtcctccattctgg

SEQ ID NO: 11070 - DNA, 15 bp, Artificial Sequence
  Primer
tgccccattgcagtc

SEQ ID NO: 11071 - DNA, 15 bp, Artificial Sequence
  Primer
ggggcactacgttgg

SEQ ID NO: 11072 - DNA, 15 bp, Artificial Sequence
  Primer
ttgttctggaccacg

SEQ ID NO: 11073 - DNA, 15 bp, Artificial Sequence
  Primer
ttaggattgcgggtg

SEQ ID NO: 11074 - DNA, 15 bp, Artificial Sequence
  Primer
ggcactacgttggtt

SEQ ID NO: 11075 - DNA, 15 bp, Artificial Sequence
  Primer
tccctctgcgtagaa

SEQ ID NO: 11076 - DNA, 15 bp, Artificial Sequence
  Primer
ctgtgaaccaagacg

SEQ ID NO: 11077 - DNA, 15 bp, Artificial Sequence
  Primer
tctggaccacgtctc

SEQ ID NO: 11078 - DNA, 15 bp, Artificial Sequence
  Primer
ccattcgagcaggag

SEQ ID NO: 11079 - DNA, 15 bp, Artificial Sequence
  Primer
gcttttcctgggtag

SEQ ID NO: 11080 - DNA, 15 bp, Artificial Sequence
  Primer
cggtggcagcattgt

SEQ ID NO: 11081 - DNA, 15 bp, Artificial Sequence
  Primer
ctagccattcgagca

SEQ ID NO: 11082 - DNA, 15 bp, Artificial Sequence
  Primer
ctgctgccaggagtt

SEQ ID NO: 11083 - DNA, 15 bp, Artificial Sequence
  Primer
cgactacgtgatgag

SEQ ID NO: 11084 - DNA, 15 bp, Artificial Sequence
  Primer
ctgtgggtccaccaa

SEQ ID NO: 11085 - DNA, 15 bp, Artificial Sequence
  Primer
gtgaaccaagacgca

SEQ ID NO: 11086 - DNA, 15 bp, Artificial Sequence
  Primer
ggccagttcctaggt

SEQ ID NO: 11087 - DNA, 15 bp, Artificial Sequence
  Primer
gaactcgtcgggtag

SEQ ID NO: 11088 - DNA, 15 bp, Artificial Sequence
  Primer
agcaatagcgcgagg

SEQ ID NO: 11089 - DNA, 15 bp, Artificial Sequence
  Primer
tgactgccgcctctg

SEQ ID NO: 11090 - DNA, 15 bp, Artificial Sequence
  Primer
ctcttcggtagtagc

SEQ ID NO: 11091 - DNA, 15 bp, Artificial Sequence
  Primer
agagatcgaggttgg

SEQ ID NO: 11092 - DNA, 15 bp, Artificial Sequence
  Primer
gatcgaggttggttg

SEQ ID NO: 11093 - DNA, 15 bp, Artificial Sequence
  Primer
gaagcttctgggcca

SEQ ID NO: 11094 - DNA, 15 bp, Artificial Sequence
  Primer
ccgtcaccaccacga

SEQ ID NO: 11095 - DNA, 15 bp, Artificial Sequence
  Primer
gccatgctgagtgag

SEQ ID NO: 11096 - DNA, 15 bp, Artificial Sequence
  Primer
cttttcctgggtagg

SEQ ID NO: 11097 - DNA, 15 bp, Artificial Sequence
  Primer
tcctccttgccatgc

SEQ ID NO: 11098 - DNA, 15 bp, Artificial Sequence
  Primer
cgaactcgtcgggta

SEQ ID NO: 11099 - DNA, 15 bp, Artificial Sequence
  Primer
agtttcaccacctcc

SEQ ID NO: 11100 - DNA, 15 bp, Artificial Sequence
  Primer
ggaagttgtagcacg

SEQ ID NO: 11101 - DNA, 15 bp, Artificial Sequence
  Primer
tgccgtcaccaccac

SEQ ID NO: 11102 - DNA, 15 bp, Artificial Sequence
  Primer
tctgcttccctctgc

SEQ ID NO: 11103 - DNA, 15 bp, Artificial Sequence
  Primer
tcgtcgggtagctct

SEQ ID NO: 11104 - DNA, 15 bp, Artificial Sequence
  Primer
gaggttggttggctt

SEQ ID NO: 11105 - DNA, 15 bp, Artificial Sequence
  Primer
cgtcaccaccacgaa

SEQ ID NO: 11106 - DNA, 15 bp, Artificial Sequence
  Primer
gtggtctttgggtgt

SEQ ID NO: 11107 - DNA, 15 bp, Artificial Sequence
  Primer
tcaccaccacgaact

SEQ ID NO: 11108 - DNA, 15 bp, Artificial Sequence
  Primer
cgtctcccaaatgct

SEQ ID NO: 11109 - DNA, 15 bp, Artificial Sequence
  Primer
ggaccactattggtg

SEQ ID NO: 11110 - DNA, 15 bp, Artificial Sequence
  Primer
cttcggtagtagcca

SEQ ID NO: 11111 - DNA, 15 bp, Artificial Sequence
  Primer
gctccctcagttgca

SEQ ID NO: 11112 - DNA, 15 bp, Artificial Sequence
  Primer
gaatctgtgggtcca

SEQ ID NO: 11113 - DNA, 15 bp, Artificial Sequence
  Primer
gtagcacggtggcag

SEQ ID NO: 11114 - DNA, 15 bp, Artificial Sequence
  Primer
gattgcgggtgccaa

SEQ ID NO: 11115 - DNA, 15 bp, Artificial Sequence
  Primer
gggtagctcttcggt

SEQ ID NO: 11116 - DNA, 15 bp, Artificial Sequence
  Primer
cacctccgctagcca

SEQ ID NO: 11117 - DNA, 15 bp, Artificial Sequence
  Primer
gccccattgcagtcc

SEQ ID NO: 11118 - DNA, 15 bp, Artificial Sequence
  Primer
gagagctgtgaacca

SEQ ID NO: 11119 - DNA, 15 bp, Artificial Sequence
  Primer
ttgccgtcaccacca

SEQ ID NO: 11120 - DNA, 15 bp, Artificial Sequence
  Primer
atctggggctgagct

SEQ ID NO: 11121 - DNA, 15 bp, Artificial Sequence
  Primer
acctccgctagccat

SEQ ID NO: 11122 - DNA, 15 bp, Artificial Sequence
  Primer
gctctcaagctggtt

SEQ ID NO: 11123 - DNA, 15 bp, Artificial Sequence
  Primer
ctggaccacgtctcc

SEQ ID NO: 11124 - DNA, 15 bp, Artificial Sequence
  Primer
tccttgccatgctga

SEQ ID NO: 11125 - DNA, 15 bp, Artificial Sequence
  Primer
aggagcgagaagagg

SEQ ID NO: 11126 - DNA, 15 bp, Artificial Sequence
  Primer
ggctccctcagttgc

SEQ ID NO: 11127 - DNA, 15 bp, Artificial Sequence
  Primer
attcaaggctccctc

SEQ ID NO: 11128 - DNA, 15 bp, Artificial Sequence
  Primer
ctctcaagctggttc

SEQ ID NO: 11129 - DNA, 15 bp, Artificial Sequence
  Primer
cttgccatgctgagt

SEQ ID NO: 11130 - DNA, 15 bp, Artificial Sequence
  Primer
gtcatctggaccact

SEQ ID NO: 11131 - DNA, 15 bp, Artificial Sequence
  Primer
ttgcggcccaatgtt

SEQ ID NO: 11132 - DNA, 15 bp, Artificial Sequence
  Primer
cttctgggccagttc

SEQ ID NO: 11133 - DNA, 15 bp, Artificial Sequence
  Primer
gagatcgaggttggt

SEQ ID NO: 11134 - DNA, 15 bp, Artificial Sequence
  Primer
cccattgcagtcctc

SEQ ID NO: 11135 - DNA, 15 bp, Artificial Sequence
  Primer
ccattgcagtcctcc

SEQ ID NO: 11136 - DNA, 15 bp, Artificial Sequence
  Primer
taccatctggggctg

SEQ ID NO: 11137 - DNA, 15 bp, Artificial Sequence
  Primer
ccctctgcgtagaag

SEQ ID NO: 11138 - DNA, 15 bp, Artificial Sequence
  Primer
cttgccccattgcag

SEQ ID NO: 11139 - DNA, 15 bp, Artificial Sequence
  Primer
gcaacccatacgatg

SEQ ID NO: 11140 - DNA, 15 bp, Artificial Sequence
  Primer
catctggggctgagc

SEQ ID NO: 11141 - DNA, 15 bp, Artificial Sequence
  Primer
cccctactgctgcca

SEQ ID NO: 11142 - DNA, 15 bp, Artificial Sequence
  Primer
gtgagagctgtgaac

SEQ ID NO: 11143 - DNA, 15 bp, Artificial Sequence
  Primer
ggcttttcctgggta

SEQ ID NO: 11144 - DNA, 15 bp, Artificial Sequence
  Primer
gactacgtgatgagg

SEQ ID NO: 11145 - DNA, 15 bp, Artificial Sequence
  Primer
gcggcccaatgtttg

SEQ ID NO: 11146 - DNA, 15 bp, Artificial Sequence
  Primer
ccatctggggctgag

SEQ ID NO: 11147 - DNA, 15 bp, Artificial Sequence
  Primer
cgcgactacgtgatg

SEQ ID NO: 11148 - DNA, 15 bp, Artificial Sequence
  Primer
accatctggggctga

SEQ ID NO: 11149 - DNA, 15 bp, Artificial Sequence
  Primer
gcttctgggccagtt

SEQ ID NO: 11150 - DNA, 15 bp, Artificial Sequence
  Primer
aggctccctcagttg

SEQ ID NO: 11151 - DNA, 15 bp, Artificial Sequence
  Primer
tgctgagtgagagct

SEQ ID NO: 11152 - DNA, 15 bp, Artificial Sequence
  Primer
tttgcggcccaatgt

SEQ ID NO: 11153 - DNA, 15 bp, Artificial Sequence
  Primer
gcacggtggcagcat

SEQ ID NO: 11154 - DNA, 15 bp, Artificial Sequence
  Primer
cgtcgggtagctctt

SEQ ID NO: 11155 - DNA, 15 bp, Artificial Sequence
  Primer
gtttttggcgaggct

SEQ ID NO: 11156 - DNA, 15 bp, Artificial Sequence
  Primer
gctcttcggtagtag

SEQ ID NO: 11157 - DNA, 15 bp, Artificial Sequence
  Primer
gcgagggcagtttca

SEQ ID NO: 11158 - DNA, 15 bp, Artificial Sequence
  Primer
cttgactgccgcctc

SEQ ID NO: 11159 - DNA, 15 bp, Artificial Sequence
  Primer
cttccctctgcgtag

SEQ ID NO: 11160 - DNA, 15 bp, Artificial Sequence
  Primer
gccattcgagcagga

SEQ ID NO: 11161 - DNA, 15 bp, Artificial Sequence
  Primer
ttttgccgtcaccac

SEQ ID NO: 11162 - DNA, 15 bp, Artificial Sequence
  Primer
ggaccacgtctccca

SEQ ID NO: 11163 - DNA, 15 bp, Artificial Sequence
  Primer
ctgcgtagaagcctt

SEQ ID NO: 11164 - DNA, 15 bp, Artificial Sequence
  Primer
ttagcgccgtaggga

SEQ ID NO: 11165 - DNA, 15 bp, Artificial Sequence
  Primer
cagtttcaccacctc

SEQ ID NO: 11166 - DNA, 15 bp, Artificial Sequence
  Primer
gctgagtgagagctg

SEQ ID NO: 11167 - DNA, 15 bp, Artificial Sequence
  Primer
ggttggcttttcctg

SEQ ID NO: 11168 - DNA, 15 bp, Artificial Sequence
  Primer
ggtaaaccttggggt

SEQ ID NO: 11169 - DNA, 15 bp, Artificial Sequence
  Primer
atgctgagtgagagc

SEQ ID NO: 11170 - DNA, 15 bp, Artificial Sequence
  Primer
cagcaatagcgcgag

SEQ ID NO: 11171 - DNA, 15 bp, Artificial Sequence
  Primer
atagcgcgagggcag

SEQ ID NO: 11172 - DNA, 15 bp, Artificial Sequence
  Primer
gcctctgcttccctc

SEQ ID NO: 11173 - DNA, 15 bp, Artificial Sequence
  Primer
ctgttttggccttgc

SEQ ID NO: 11174 - DNA, 15 bp, Artificial Sequence
  Primer
ttctggaccacgtct

SEQ ID NO: 11175 - DNA, 15 bp, Artificial Sequence
  Primer
agcacggtggcagca

SEQ ID NO: 11176 - DNA, 15 bp, Artificial Sequence
  Primer
cccatacgatgcctt

SEQ ID NO: 11177 - DNA, 15 bp, Artificial Sequence
  Primer
ctctgcttccctctg

SEQ ID NO: 11178 - DNA, 15 bp, Artificial Sequence
  Primer
tggcttttcctgggt

SEQ ID NO: 11179 - DNA, 15 bp, Artificial Sequence
  Primer
gccagttcctaggta

SEQ ID NO: 11180 - DNA, 15 bp, Artificial Sequence
  Primer
ttcccctactgctgc

SEQ ID NO: 11181 - DNA, 15 bp, Artificial Sequence
  Primer
gtgatgaggagcgag

SEQ ID NO: 11182 - DNA, 15 bp, Artificial Sequence
  Primer
tgcctcagcagcaga

SEQ ID NO: 11183 - DNA, 15 bp, Artificial Sequence
  Primer
ggcctcgagggaatc

SEQ ID NO: 11184 - DNA, 15 bp, Artificial Sequence
  Primer
ggtcttggtccccga

SEQ ID NO: 11185 - DNA, 15 bp, Artificial Sequence
  Primer
gaggagcgagaagag

SEQ ID NO: 11186 - DNA, 15 bp, Artificial Sequence
  Primer
tgcttccctctgcgt

SEQ ID NO: 11187 - DNA, 15 bp, Artificial Sequence
  Primer
ttccctctgcgtaga

SEQ ID NO: 11188 - DNA, 15 bp, Artificial Sequence
  Primer
agttcctccttgcca

SEQ ID NO: 11189 - DNA, 15 bp, Artificial Sequence
  Primer
ccgcgactacgtgat

SEQ ID NO: 11190 - DNA, 15 bp, Artificial Sequence
  Primer
gtgccaatgtggtct

SEQ ID NO: 11191 - DNA, 15 bp, Artificial Sequence
  Primer
cacgtctcccaaatg

SEQ ID NO: 11192 - DNA, 15 bp, Artificial Sequence
  Primer
actgccgcctctgct

SEQ ID NO: 11193 - DNA, 15 bp, Artificial Sequence
  Primer
gctgtgaaccaagac

SEQ ID NO: 11194 - DNA, 15 bp, Artificial Sequence
  Primer
gttggcctttaccag

SEQ ID NO: 11195 - DNA, 15 bp, Artificial Sequence
  Primer
tgcagtcctccattc

SEQ ID NO: 11196 - DNA, 15 bp, Artificial Sequence
  Primer
agcgccgtagggaag

SEQ ID NO: 11197 - DNA, 15 bp, Artificial Sequence
  Primer
ggtggcagcattgtt

SEQ ID NO: 11198 - DNA, 15 bp, Artificial Sequence
  Primer
gtaccatctggggct

SEQ ID NO: 11199 - DNA, 15 bp, Artificial Sequence
  Primer
gtcctccattctggt

SEQ ID NO: 11200 - DNA, 15 bp, Artificial Sequence
  Primer
gggtccaccaaatgt

SEQ ID NO: 11201 - DNA, 15 bp, Artificial Sequence
  Primer
ctggggctgagctct

SEQ ID NO: 11202 - DNA, 15 bp, Artificial Sequence
  Primer
tgccgcctctgcttc

SEQ ID NO: 11203 - DNA, 15 bp, Artificial Sequence
  Primer
ccccattgcagtcct

SEQ ID NO: 11204 - DNA, 15 bp, Artificial Sequence
  Primer
ctttgttagcgccgt

SEQ ID NO: 11205 - DNA, 15 bp, Artificial Sequence
  Primer
gcctcagcagcagat

SEQ ID NO: 11206 - DNA, 15 bp, Artificial Sequence
  Primer
cattttgccgtcacc

SEQ ID NO: 11207 - DNA, 15 bp, Artificial Sequence
  Primer
cattgcagtcctcca

SEQ ID NO: 11208 - DNA, 15 bp, Artificial Sequence
  Primer
cctccttgccatgct

SEQ ID NO: 11209 - DNA, 15 bp, Artificial Sequence
  Primer
ttcaccacctccgct

SEQ ID NO: 11210 - DNA, 15 bp, Artificial Sequence
  Primer
gaccacgtctcccaa

SEQ ID NO: 11211 - DNA, 15 bp, Artificial Sequence
  Primer
ctggcctcgagggaa

SEQ ID NO: 11212 - DNA, 15 bp, Artificial Sequence
  Primer
gagctgtgaaccaag

SEQ ID NO: 11213 - DNA, 15 bp, Artificial Sequence
  Primer
gcagtttcaccacct

SEQ ID NO: 11214 - DNA, 15 bp, Artificial Sequence
  Primer
gcagcaatagcgcga

SEQ ID NO: 11215 - DNA, 15 bp, Artificial Sequence
  Primer
gctgccaggagttga

SEQ ID NO: 11216 - DNA, 15 bp, Artificial Sequence
  Primer
gtagctcttcggtag

SEQ ID NO: 11217 - DNA, 15 bp, Artificial Sequence
  Primer
tgagtgagagctgtg

SEQ ID NO: 11218 - DNA, 15 bp, Artificial Sequence
  Primer
cgtgatgaggagcga

SEQ ID NO: 11219 - DNA, 15 bp, Artificial Sequence
  Primer
cgcctctgcttccct

SEQ ID NO: 11220 - DNA, 15 bp, Artificial Sequence
  Primer
cggcccaatgtttgt

SEQ ID NO: 11221 - DNA, 15 bp, Artificial Sequence
  Primer
gcttgactgccgcct

SEQ ID NO: 11222 - DNA, 15 bp, Artificial Sequence
  Primer
cgccgtagggaagtg

SEQ ID NO: 11223 - DNA, 15 bp, Artificial Sequence
  Primer
gcgactacgtgatga

SEQ ID NO: 11224 - DNA, 15 bp, Artificial Sequence
  Primer
caaggctccctcagt

SEQ ID NO: 11225 - DNA, 15 bp, Artificial Sequence
  Primer
aaggctccctcagtt

SEQ ID NO: 11226 - DNA, 15 bp, Artificial Sequence
  Primer
tggggctgagctctt

SEQ ID NO: 11227 - DNA, 15 bp, Artificial Sequence
  Primer
gtcttggtccccgaa

SEQ ID NO: 11228 - DNA, 15 bp, Artificial Sequence
  Primer
cagtcctccattctg

SEQ ID NO: 11229 - DNA, 15 bp, Artificial Sequence
  Primer
gagcgagaagaggct

SEQ ID NO: 11230 - DNA, 15 bp, Artificial Sequence
  Primer
gcgagaagaggcttg

SEQ ID NO: 11231 - DNA, 15 bp, Artificial Sequence
  Primer
gtccccgaaatttcc

SEQ ID NO: 11232 - DNA, 15 bp, Artificial Sequence
  Primer
tacgtgatgaggagc

SEQ ID NO: 11233 - DNA, 15 bp, Artificial Sequence
  Primer
gttggcttttcctgg

SEQ ID NO: 11234 - DNA, 15 bp, Artificial Sequence
  Primer
gtagggaagtgaagc

SEQ ID NO: 11235 - DNA, 15 bp, Artificial Sequence
  Primer
caccacctccgctag

SEQ ID NO: 11236 - DNA, 15 bp, Artificial Sequence
  Primer
agcgagaagaggctt

SEQ ID NO: 11237 - DNA, 15 bp, Artificial Sequence
  Primer
atgaggagcgagaag

SEQ ID NO: 11238 - DNA, 15 bp, Artificial Sequence
  Primer
tcaccacctccgcta

SEQ ID NO: 11239 - DNA, 15 bp, Artificial Sequence
  Primer
ttcctccttgccatg

SEQ ID NO: 11240 - DNA, 15 bp, Artificial Sequence
  Primer
gccttgccccattgc

SEQ ID NO: 11241 - DNA, 15 bp, Artificial Sequence
  Primer
agcgcgagggcagtt

SEQ ID NO: 11242 - DNA, 15 bp, Artificial Sequence
  Primer
catgctgagtgagag

SEQ ID NO: 11243 - DNA, 15 bp, Artificial Sequence
  Primer
tttcccctactgctg

SEQ ID NO: 11244 - DNA, 15 bp, Artificial Sequence
  Primer
tgaggagcgagaaga

SEQ ID NO: 11245 - DNA, 15 bp, Artificial Sequence
  Primer
ctgagtgagagctgt

SEQ ID NO: 11246 - DNA, 15 bp, Artificial Sequence
  Primer
gcctcgagggaatct

SEQ ID NO: 11247 - DNA, 15 bp, Artificial Sequence
  Primer
ggtagctcttcggta

SEQ ID NO: 11248 - DNA, 15 bp, Artificial Sequence
  Primer
cctcgagggaatcta

SEQ ID NO: 11249 - DNA, 15 bp, Artificial Sequence
  Primer
ttgccccattgcagt

SEQ ID NO: 11250 - DNA, 15 bp, Artificial Sequence
  Primer
gccgtagggaagtga

SEQ ID NO: 11251 - DNA, 15 bp, Artificial Sequence
  Primer
tagcgccgtagggaa

SEQ ID NO: 11252 - DNA, 15 bp, Artificial Sequence
  Primer
ttcaaggctccctca

SEQ ID NO: 11253 - DNA, 15 bp, Artificial Sequence
  Primer
ccgtagggaagtgaa

SEQ ID NO: 11254 - DNA, 15 bp, Artificial Sequence
  Primer
ttgactgccgcctct

SEQ ID NO: 11255 - DNA, 15 bp, Artificial Sequence
  Primer
gtcgggtagctcttc

SEQ ID NO: 11256 - DNA, 15 bp, Artificial Sequence
  Primer
gcttccctctgcgta

SEQ ID NO: 11257 - DNA, 15 bp, Artificial Sequence
  Primer
gcagtcctccattct

SEQ ID NO: 11258 - DNA, 15 bp, Artificial Sequence
  Primer
cattcgagcaggaga

SEQ ID NO: 11259 - DNA, 15 bp, Artificial Sequence
  Primer
gttcctccttgccat

SEQ ID NO: 11260 - DNA, 15 bp, Artificial Sequence
  Primer
tagcgcgagggcagt

SEQ ID NO: 11261 - DNA, 15 bp, Artificial Sequence
  Primer
ctgccgcctctgctt

SEQ ID NO: 11262 - DNA, 15 bp, Artificial Sequence
  Primer
cgagaagaggcttga

SEQ ID NO: 11263 - DNA, 15 bp, Artificial Sequence
  Primer
gggctgagctctttc

SEQ ID NO: 11264 - DNA, 15 bp, Artificial Sequence
  Primer
ccatacgatgccttc

SEQ ID NO: 11265 - DNA, 15 bp, Artificial Sequence
  Primer
ctgggccagttccta

SEQ ID NO: 11266 - DNA, 15 bp, Artificial Sequence
  Primer
gagtgagagctgtga

SEQ ID NO: 11267 - DNA, 15 bp, Artificial Sequence
  Primer
ctccgctagccattc

SEQ ID NO: 11268 - DNA, 15 bp, Artificial Sequence
  Primer
cctctgcttccctct

SEQ ID NO: 11269 - DNA, 15 bp, Artificial Sequence
  Primer
ctgccaggagttgaa

SEQ ID NO: 11270 - DNA, 15 bp, Artificial Sequence
  Primer
tttggccttgcccca

SEQ ID NO: 11271 - DNA, 15 bp, Artificial Sequence
  Primer
ccttgccccattgca

SEQ ID NO: 11272 - DNA, 15 bp, Artificial Sequence
  Primer
ggccttgccccattg

SEQ ID NO: 11273 - DNA, 15 bp, Artificial Sequence
  Primer
ctacgtgatgaggag

SEQ ID NO: 11274 - DNA, 15 bp, Artificial Sequence
  Primer
ccatgctgagtgaga

SEQ ID NO: 11275 - DNA, 15 bp, Artificial Sequence
  Primer
ggctgagctctttca

SEQ ID NO: 11276 - DNA, 15 bp, Artificial Sequence
  Primer
cgtagggaagtgaag

SEQ ID NO: 11277 - DNA, 15 bp, Artificial Sequence
  Primer
ggggggcactacgtt

SEQ ID NO: 11278 - DNA, 15 bp, Artificial Sequence
  Primer
ggcgaggctttttag

SEQ ID NO: 11279 - DNA, 15 bp, Artificial Sequence
  Primer
tgatgaggagcgaga

SEQ ID NO: 11280 - DNA, 15 bp, Artificial Sequence
  Primer
ttggccttgccccat

SEQ ID NO: 11281 - DNA, 15 bp, Artificial Sequence
  Primer
gggggcactacgttg

SEQ ID NO: 11282 - DNA, 15 bp, Artificial Sequence
  Primer
gcgccgtagggaagt

SEQ ID NO: 11283 - DNA, 21 bp, Artificial Sequence
  Primer
gaccaagacctaatcagacaa

SEQ ID NO: 11284 - DNA, 20 bp, Artificial Sequence
  Primer
accaagacctaatcagacaa

SEQ ID NO: 11285 - DNA, 20 bp, Artificial Sequence
  Primer
gaccaagacctaatcagaca

SEQ ID NO: 11286 - DNA, 21 bp, Artificial Sequence
  Primer
tcagacaaggaactgattaca

SEQ ID NO: 11287 - DNA, 20 bp, Artificial Sequence
  Primer
cagaacaaacccaaggaaat

SEQ ID NO: 11288 - DNA, 20 bp, Artificial Sequence
  Primer
ggaccaagacctaatcagac

SEQ ID NO: 11289 - DNA, 22 bp, Artificial Sequence
  Primer
atcagacaaggaactgattaca

SEQ ID NO: 11290 - DNA, 22 bp, Artificial Sequence
  Primer
caagacctaatcagacaaggaa

SEQ ID NO: 11291 - DNA, 23 bp, Artificial Sequence
  Primer
aatcagacaaggaactgattaca

SEQ ID NO: 11292 - DNA, 21 bp, Artificial Sequence
  Primer
gggaccaagacctaatcagac

SEQ ID NO: 11293 - DNA, 21 bp, Artificial Sequence
  Primer
aagacctaatcagacaaggaa

SEQ ID NO: 11294 - DNA, 20 bp, Artificial Sequence
  Primer
cagacaaggaactgattaca

SEQ ID NO: 11295 - DNA, 21 bp, Artificial Sequence
  Primer
gacaaggaactgattacaaac

SEQ ID NO: 11296 - DNA, 18 bp, Artificial Sequence
  Primer
cggggaccaagacctaat

SEQ ID NO: 11297 - DNA, 19 bp, Artificial Sequence
  Primer
ggagacgtggtccagaaca

SEQ ID NO: 11298 - DNA, 18 bp, Artificial Sequence
  Primer
gagacgtggtccagaaca

SEQ ID NO: 11299 - DNA, 22 bp, Artificial Sequence
  Primer
gaccaagacctaatcagacaag

SEQ ID NO: 11300 - DNA, 20 bp, Artificial Sequence
  Primer
ccagaacaaacccaaggaaa

SEQ ID NO: 11301 - DNA, 17 bp, Artificial Sequence
  Primer
ttcggggaccaagacct

SEQ ID NO: 11302 - DNA, 22 bp, Artificial Sequence
  Primer
agacctaatcagacaaggaact

SEQ ID NO: 11303 - DNA, 22 bp, Artificial Sequence
  Primer
agacctaatcagacaaggaact

SEQ ID NO: 11304 - DNA, 23 bp, Artificial Sequence
  Primer
tagagaacagatctacaagagat

SEQ ID NO: 11305 - DNA, 21 bp, Artificial Sequence
  Primer
tagagaacagatctacaagag

SEQ ID NO: 11306 - DNA, 22 bp, Artificial Sequence
  Primer
gtttagagaacagatctacaag

SEQ ID NO: 11307 - DNA, 22 bp, Artificial Sequence
  Primer
ttagagaacagatctacaagag

SEQ ID NO: 11308 - DNA, 23 bp, Artificial Sequence
  Primer
tttagagaacagatctacaagag

SEQ ID NO: 11309 - DNA, 23 bp, Artificial Sequence
  Primer
ttagagaacagatctacaagaga

SEQ ID NO: 11310 - DNA, 23 bp, Artificial Sequence
  Primer
gtttagagaacagatctacaaga

SEQ ID NO: 11311 - DNA, 20 bp, Artificial Sequence
  Primer
gagaacagatctacaagaga

SEQ ID NO: 11312 - DNA, 21 bp, Artificial Sequence
  Primer
tcgtttagagaacagatctac

SEQ ID NO: 11313 - DNA, 22 bp, Artificial Sequence
  Primer
tttagagaacagatctacaaga

SEQ ID NO: 11314 - DNA, 21 bp, Artificial Sequence
  Primer
cgtttagagaacagatctaca

SEQ ID NO: 11315 - DNA, 20 bp, Artificial Sequence
  Primer
tctacaagagatcgaggttg

SEQ ID NO: 11316 - DNA, 19 bp, Artificial Sequence
  Primer
aagagatcgaggttggttg

SEQ ID NO: 11317 - DNA, 22 bp, Artificial Sequence
  Primer
ttcgtttagagaacagatctac

SEQ ID NO: 11318 - DNA, 22 bp, Artificial Sequence
  Primer
cgtttagagaacagatctacaa

SEQ ID NO: 11319 - DNA, 20 bp, Artificial Sequence
  Primer
caagagatcgaggttggttg

SEQ ID NO: 11320 - DNA, 22 bp, Artificial Sequence
  Primer
tcgtttagagaacagatctaca

SEQ ID NO: 11321 - DNA, 22 bp, Artificial Sequence
  Primer
tttgttcgtttagagaacagat

SEQ ID NO: 11322 - DNA, 22 bp, Artificial Sequence
  Primer
ttgttcgtttagagaacagatc

SEQ ID NO: 11323 - DNA, 1869 bp, SARS coronavirus
cctaggcatacccaaaggacatgacctaccgtagactcatctctatgatgggtttcaaaatgaattaccaagtcaatggttaccctaatatgtttatcacccgcgaagaagctattcgtcacgttcgtgcgtggattggctttgatgtagagggctgtcatgcaactagagatgctgtgggtactaacctacctctccagctaggattttctacaggtgttaacttagtagctgtaccgactggttatgttgacactgaaaataacacagaattcaccagagttaatgcaaaacctccaccaggtgaccagtttaaacatcttataccactcatgtataaaggcttgccctggaatgtagtgcgtattaagatagtacaaatgctcagtgatacactgaaaggattgtcagacagagtcgtgttcgtcctttgggcgcatggctttgagcttacatcaatgaagtactttgtcaagattggacctgaaagaacgtgttgtctgtgtgacaaacgtgcaacttgcttttctacttcatcagatacttatgcctgctggaatcattctgtgggttttgactatgtctataacccatttatgattgatgttcagcagtggggctttacgggtaaccttcagagtaaccatgaccaacattgccaggtacatggaaatgcacatgtggctagttgtgatgctatcatgactagatgtttagcagtccatgagtgctttgttaagcgcgttgattggtctgttgaataccctattataggagatgaactgagggttaattctgcttgcagaaaagtacaacacatggttgtgaagtctgcattgcttgctgataagtttccagttcttcatgacataggaaatccaaaggctatcaagtgtgtgcctcaggctgaagtagaatggaagttctacgatgctcagccatgtagtgacaaagcttacaaaatagaggaactcttctattcttatgctatacatcacgataaattcactgatggtgtttgtttgttttggaattgtaacgttgatcgttacccagccaatgcaattgtgtgtaggtttgacacaagagtcttgtcaaacttgaacttaccaggctgtgatggtggtagtttgtatgtgaataagcatgcattccacactccagctttcgataaaagtgcatttactaatttaaagcaattgcctttcttttactattctgatagtccttgtgagtctcatggcaaacaagtagtgtcggatattgattatgttccactcaaatctgctacgtgtattacacgatgcaatttaggtggtgctgtttgcagacaccatgcaaatgagtaccgacagtacttggatgcatataatatgatgatttctgctggatttagcctatggatttacaaacaatttgatacttataacctgtggaatacatttaccaggttacagagtttagaaaatgtggcttataatgttgttaataaaggacactttgatggacacgccggcgaagcacctgtttccatcattaataatgctgtttacacaaaggtagatggtattgatgtggagatctttgaaaataagacaacacttcctgttaatgttgcatttgagctttgggctaagcgtaacattaaaccagtgccagagattaagatactcaataatttgggtgttgatatcgctgctaatactgtaatctgggactacaaaagagaagccccagcacatgtatctacaataggtgtctgcacaatgactgacattgccaagaaacctactgagagtgcttgttcttcacttactgtcttgtttgatggtagagtggaaggacaggtagacctttttagaaacgccc

SEQ ID NO: 11324 - protein, 616 aa, SARS coronavirus
MTYRRLISMMGFKMNYQVNGYPNMFITREEAIRHVRAWIGFDVEGCHATRDAVGTNLPLQLGFSTGVNLVAVPTGYVDTENNTEFTRVNAKPPPGDQFKHLIPLMYKGLPWNVVRIKIVQMLSDTLKGLSDRVVFVLWAHGFELTSMKYFVKIGPERTCCLCDKRATCFSTSSDTYACWNHSVGFDYVYNPFMIDVQQWGFTGNLQSNHDQHCQVHGNAHVASCDAIMTRCLAVHECFVKRVDWSVEYPIIGDELRVNSACRKVQHMVVKSALLADKFPVLHDIGNPKAIKCVPQAEVEWKFYDAQPCSDKAYKIEELFYSYAIHHDKFTDGVCLFWNCNVDRYPANAIVCRFDTRVLSNLNLPGCDGGSLYVNKHAFHTPAFDKSAFTNLKQLPFFYYSDSPCESHGKQVVSDIDYVPLKSATCITRCNLGGAVCRHHANEYRQYLDAYNMMISAGFSLWIYKQFDTYNLWNTFTRLQSLENVAYNVVNKGHFDGHAGEAPVSIINNAVYTKVDGIDVEIFENKTTLPVNVAFELWAKRNIKPVPEIKILNNLGVDIAANTVIWDYKREAPAHVSTIGVCTMTDIAKKPTESACSSLTVLFDGRVEGQVDLFRNA

SEQ ID NO: 11325 - DNA, 20 bp, Artificial Sequence
  Primer
acacgccggcgaagcacctg

SEQ ID NO: 11326 - DNA, 20 bp, Artificial Sequence
  Primer
accatgaccaacattgccag

SEQ ID NO: 11327 - DNA, 21 bp, Artificial Sequence
  Primer
acacatggttgtgaagtctgc

SEQ ID NO: 11328 - DNA, 21 bp, Artificial Sequence
  Primer
tgtcagacagagtcgtgttcg

SEQ ID NO: 11329 - DNA, 20 bp, Artificial Sequence
  Primer
tggtgctgtttgcagacacc

SEQ ID NO: 11330 - DNA, 20 bp, Artificial Sequence
  Primer
tgtctgtgtgacaaacgtgc

SEQ ID NO: 11331 - DNA, 20 bp, Artificial Sequence
  Primer
ttgggcgcatggctttgagc

SEQ ID NO: 11332 - DNA, 20 bp, Artificial Sequence
  Primer
gctgtttgcagacaccatgc

SEQ ID NO: 11333 - DNA, 20 bp, Artificial Sequence
  Primer
cacgttcgtgcgtggattgg

SEQ ID NO: 11334 - DNA, 20 bp, Artificial Sequence
  Primer
tgaccaacattgccaggtac

SEQ ID NO: 11335 - DNA, 20 bp, Artificial Sequence
  Primer
tttgggcgcatggctttgag

SEQ ID NO: 11336 - DNA, 20 bp, Artificial Sequence
  Primer
caagtgtgtgcctcaggctg

SEQ ID NO: 11337 - DNA, 20 bp, Artificial Sequence
  Primer
gtggtgctgtttgcagacac

SEQ ID NO: 11338 - DNA, 21 bp, Artificial Sequence
  Primer
tgtttagcagtccatgagtgc

SEQ ID NO: 11339 - DNA, 23 bp, Artificial Sequence
  Primer
accactcatgtataaaggcttgc

SEQ ID NO: 11340 - DNA, 21 bp, Artificial Sequence
  Primer
gcatacccaaaggacatgacc

SEQ ID NO: 11341 - DNA, 20 bp, Artificial Sequence
  Primer
tcacgttcgtgcgtggattg

SEQ ID NO: 11342 - DNA, 21 bp, Artificial Sequence
  Primer
gtaccgacagtacttggatgc

SEQ ID NO: 11343 - DNA, 20 bp, Artificial Sequence
  Primer
gcatgcattccacactccag

SEQ ID NO: 11344 - DNA, 21 bp, Artificial Sequence
  Primer
tgaagtctgcattgcttgctg

SEQ ID NO: 11345 - DNA, 20 bp, Artificial Sequence
  Primer
gatcgttacccagccaatgc

SEQ ID NO: 11346 - DNA, 20 bp, Artificial Sequence
  Primer
attcgtcacgttcgtgcgtg

SEQ ID NO: 11347 - DNA, 21 bp, Artificial Sequence
  Primer
ctatcaagtgtgtgcctcagg

SEQ ID NO: 11348 - DNA, 23 bp, Artificial Sequence
  Primer
agagtaaccatgaccaacattgc

SEQ ID NO: 11349 - DNA, 20 bp, Artificial Sequence
  Primer
ttcgtcacgttcgtgcgtgg

SEQ ID NO: 11350 - DNA, 22 bp, Artificial Sequence
  Primer
ccaaaggctatcaagtgtgtgc

SEQ ID NO: 11351 - DNA, 20 bp, Artificial Sequence
  Primer
tggacacgccggcgaagcac

SEQ ID NO: 11352 - DNA, 23 bp, Artificial Sequence
  Primer
ctgctacgtgtattacacgatgc

SEQ ID NO: 11353 - DNA, 21 bp, Artificial Sequence
  Primer
acgatgcaatttaggtggtgc

SEQ ID NO: 11354 - DNA, 20 bp, Artificial Sequence
  Primer
ccatgaccaacattgccagg

SEQ ID NO: 11355 - DNA, 21 bp, Artificial Sequence
  Primer
gctatcaagtgtgtgcctcag

SEQ ID NO: 11356 - DNA, 20 bp, Artificial Sequence
  Primer
ttaccaggctgtgatggtgg

SEQ ID NO: 11357 - DNA, 22 bp, Artificial Sequence
  Primer
cgatgcaatttaggtggtgctg

SEQ ID NO: 11358 - DNA, 20 bp, Artificial Sequence
  Primer
aacctccaccaggtgaccag

SEQ ID NO: 11359 - DNA, 20 bp, Artificial Sequence
  Primer
gtggggctttacgggtaacc

SEQ ID NO: 11360 - DNA, 20 bp, Artificial Sequence
  Primer
ttcagcagtggggctttacg

SEQ ID NO: 11361 - DNA, 20 bp, Artificial Sequence
  Primer
gatggacacgccggcgaagc

SEQ ID NO: 11362 - DNA, 20 bp, Artificial Sequence
  Primer
ctgtgtgacaaacgtgcaac

SEQ ID NO: 11363 - DNA, 20 bp, Artificial Sequence
  Primer
catgcattccacactccagc

SEQ ID NO: 11364 - DNA, 20 bp, Artificial Sequence
  Primer
aaaacctccaccaggtgacc

SEQ ID NO: 11365 - DNA, 20 bp, Artificial Sequence
  Primer
caaaacctccaccaggtgac

SEQ ID NO: 11366 - DNA, 21 bp, Artificial Sequence
  Primer
gaacttaccaggctgtgatgg

SEQ ID NO: 11367 - DNA, 23 bp, Artificial Sequence
  Primer
tcaaacttgaacttaccaggctg

SEQ ID NO: 11368 - DNA, 22 bp, Artificial Sequence
  Primer
aggattgtcagacagagtcgtg

SEQ ID NO: 11369 - DNA, 23 bp, Artificial Sequence
  Primer
gtcatgcaactagagatgctgtg

SEQ ID NO: 11370 - DNA, 23 bp, Artificial Sequence
  Primer
agttaatgcaaaacctccaccag

SEQ ID NO: 11371 - DNA, 25 bp, Artificial Sequence
  Primer
gctaagcgtaacattaaaccagtgc

SEQ ID NO: 11372 - DNA, 20 bp, Artificial Sequence
  Primer
ttgggtgttgatatcgctgc

SEQ ID NO: 11373 - DNA, 22 bp, Artificial Sequence
  Primer
acttagtagctgtaccgactgg

SEQ ID NO: 11374 - DNA, 22 bp, Artificial Sequence
  Primer
tgagggttaattctgcttgcag

SEQ ID NO: 11375 - DNA, 21 bp, Artificial Sequence
  Primer
ggaagttctacgatgctcagc

SEQ ID NO: 11376 - DNA, 21 bp, Artificial Sequence
  Primer
gcgaagaagctattcgtcacg

SEQ ID NO: 11377 - DNA, 20 bp, Artificial Sequence
  Primer
gatgtagagggctgtcatgc

SEQ ID NO: 11378 - DNA, 21 bp, Artificial Sequence
  Primer
gttctacgatgctcagccatg

SEQ ID NO: 11379 - DNA, 20 bp, Artificial Sequence
  Primer
aacgttgatcgttacccagc

SEQ ID NO: 11380 - DNA, 20 bp, Artificial Sequence
  Primer
gagtcgtgttcgtcctttgg

SEQ ID NO: 11381 - DNA, 22 bp, Artificial Sequence
  Primer
actgagggttaattctgcttgc

SEQ ID NO: 11382 - DNA, 23 bp, Artificial Sequence
  Primer
gttccactcaaatctgctacgtg

SEQ ID NO: 11383 - DNA, 21 bp, Artificial Sequence
  Primer
tggttgtgaagtctgcattgc

SEQ ID NO: 11384 - DNA, 22 bp, Artificial Sequence
  Primer
ggacctgaaagaacgtgttgtc

SEQ ID NO: 11385 - DNA, 20 bp, Artificial Sequence
  Primer
ttcgtcctttgggcgcatgg

SEQ ID NO: 11386 - DNA, 22 bp, Artificial Sequence
  Primer
gaagctattcgtcacgttcgtg

SEQ ID NO: 11387 - DNA, 20 bp, Artificial Sequence
  Primer
gttcgtcctttgggcgcatg

SEQ ID NO: 11388 - DNA, 20 bp, Artificial Sequence
  Primer
agacagagtcgtgttcgtcc

SEQ ID NO: 11389 - DNA, 20 bp, Artificial Sequence
  Primer
aagcatgcattccacactcc

SEQ ID NO: 11390 - DNA, 21 bp, Artificial Sequence
  Primer
ttgatcgttacccagccaatg

SEQ ID NO: 11391 - DNA, 22 bp, Artificial Sequence
  Primer
aacttgaacttaccaggctgtg

SEQ ID NO: 11392 - DNA, 21 bp, Artificial Sequence
  Primer
gctttgatgtagagggctgtc

SEQ ID NO: 11393 - DNA, 22 bp, Artificial Sequence
  Primer
ccttgtgagtctcatggcaaac

SEQ ID NO: 11394 - DNA, 20 bp, Artificial Sequence
  Primer
gtgtgtgcctcaggctgaag

SEQ ID NO: 11395 - DNA, 21 bp, Artificial Sequence
  Primer
tcagacagagtcgtgttcgtc

SEQ ID NO: 11396 - DNA, 20 bp, Artificial Sequence
  Primer
gtgaagtctgcattgcttgc

SEQ ID NO: 11397 - DNA, 27 bp, Artificial Sequence
  Primer
gcacatgtatctacaataggtgtctgc

SEQ ID NO: 11398 - DNA, 23 bp, Artificial Sequence
  Primer
ggtacatggaaatgcacatgtgg

SEQ ID NO: 11399 - DNA, 20 bp, Artificial Sequence
  Primer
gctattcgtcacgttcgtgc

SEQ ID NO: 11400 - DNA, 20 bp, Artificial Sequence
  Primer
taaaggcttgccctggaatg

SEQ ID NO: 11401 - DNA, 22 bp, Artificial Sequence
  Primer
gttgtgaagtctgcattgcttg

SEQ ID NO: 11402 - DNA, 23 bp, Artificial Sequence
  Primer
gaagaagctattcgtcacgttcg

SEQ ID NO: 11403 - DNA, 22 bp, Artificial Sequence
  Primer
gctttgttaagcgcgttgattg

SEQ ID NO: 11404 - DNA, 22 bp, Artificial Sequence
  Primer
caatttaggtggtgctgtttgc

SEQ ID NO: 11405 - DNA, 23 bp, Artificial Sequence
  Primer
catcagatacttatgcctgctgg

SEQ ID NO: 11406 - DNA, 20 bp, Artificial Sequence
  Primer
tttatcacccgcgaagaagc

SEQ ID NO: 11407 - DNA, 20 bp, Artificial Sequence
  Primer
gtgctttgttaagcgcgttg

SEQ ID NO: 11408 - DNA, 20 bp, Artificial Sequence
  Primer
gttcagcagtggggctttac

SEQ ID NO: 11409 - DNA, 20 bp, Artificial Sequence
  Primer
aatgcaaaacctccaccagg

SEQ ID NO: 11410 - DNA, 22 bp, Artificial Sequence
  Primer
catgcaactagagatgctgtgg

SEQ ID NO: 11411 - DNA, 23 bp, Artificial Sequence
  Primer
gcgtaacattaaaccagtgccag

SEQ ID NO: 11412 - DNA, 22 bp, Artificial Sequence
  Primer
ccatgcaaatgagtaccgacag

SEQ ID NO: 11413 - DNA, 20 bp, Artificial Sequence
  Primer
ggctttgatgtagagggctg

SEQ ID NO: 11414 - DNA, 20 bp, Artificial Sequence
  Primer
tgatggacacgccggcgaag

SEQ ID NO: 11415 - DNA, 23 bp, Artificial Sequence
  Primer
agagttaatgcaaaacctccacc

SEQ ID NO: 11416 - DNA, 21 bp, Artificial Sequence
  Primer
cagagtcgtgttcgtcctttg

SEQ ID NO: 11417 - DNA, 25 bp, Artificial Sequence
  Primer
cttcatcagatacttatgcctgctg

SEQ ID NO: 11418 - DNA, 20 bp, Artificial Sequence
  Primer
tggtagagtggaaggacagg

SEQ ID NO: 11419 - DNA, 22 bp, Artificial Sequence
  Primer
ccaagaaacctactgagagtgc

SEQ ID NO: 11420 - DNA, 24 bp, Artificial Sequence
  Primer
cagatacttatgcctgctggaatc

SEQ ID NO: 11421 - DNA, 20 bp, Artificial Sequence
  Primer
ggctatcaagtgtgtgcctc

SEQ ID NO: 11422 - DNA, 23 bp, Artificial Sequence
  Primer
ctttgatgtagagggctgtcatg

SEQ ID NO: 11423 - DNA, 25 bp, Artificial Sequence
  Primer
cctaatatgtttatcacccgcgaag

SEQ ID NO: 11424 - DNA, 23 bp, Artificial Sequence
  Primer
cttgaacttaccaggctgtgatg

SEQ ID NO: 11425 - DNA, 20 bp, Artificial Sequence
  Primer
attccacactccagctttcg

SEQ ID NO: 11426 - DNA, 23 bp, Artificial Sequence
  Primer
cgaagaagctattcgtcacgttc

SEQ ID NO: 11427 - DNA, 22 bp, Artificial Sequence
  Primer
atgtttatcacccgcgaagaag

SEQ ID NO: 11428 - DNA, 22 bp, Artificial Sequence
  Primer
catgtataaaggcttgccctgg

SEQ ID NO: 11429 - DNA, 20 bp, Artificial Sequence
  Primer
aagagaagccccagcacatg

SEQ ID NO: 11430 - DNA, 23 bp, Artificial Sequence
  Primer
ctcatgtataaaggcttgccctg

SEQ ID NO: 11431 - DNA, 23 bp, Artificial Sequence
  Primer
gattgtcagacagagtcgtgttc

SEQ ID NO: 11432 - DNA, 24 bp, Artificial Sequence
  Primer
cgtaacattaaaccagtgccagag

SEQ ID NO: 11433 - DNA, 23 bp, Artificial Sequence
  Primer
gcaactagagatgctgtgggtac

SEQ ID NO: 11434 - DNA, 22 bp, Artificial Sequence
  Primer
tgatggtagagtggaaggacag

SEQ ID NO: 11435 - DNA, 22 bp, Artificial Sequence
  Primer
ggtactaacctacctctccagc

SEQ ID NO: 11436 - DNA, 23 bp, Artificial Sequence
  Primer
gaaaggattgtcagacagagtcg

SEQ ID NO: 11437 - DNA, 22 bp, Artificial Sequence
  Primer
gggtactaacctacctctccag

SEQ ID NO: 11438 - DNA, 22 bp, Artificial Sequence
  Primer
aaaggacactttgatggacacg

SEQ ID NO: 11439 - DNA, 23 bp, Artificial Sequence
  Primer
gtttgatggtagagtggaaggac

SEQ ID NO: 11440 - DNA, 24 bp, Artificial Sequence
  Primer
cttgtttgatggtagagtggaagg

SEQ ID NO: 11441 - DNA, 20 bp, Artificial Sequence
  Primer
aggtgcttcgccggcgtgtc

SEQ ID NO: 11442 - DNA, 20 bp, Artificial Sequence
  Primer
acaggtgcttcgccggcgtg

SEQ ID NO: 11443 - DNA, 21 bp, Artificial Sequence
  Primer
agtctacggtaggtcatgtcc

SEQ ID NO: 11444 - DNA, 20 bp, Artificial Sequence
  Primer
acaaagcactcatggactgc

SEQ ID NO: 11445 - DNA, 20 bp, Artificial Sequence
  Primer
agccaatccacgcacgaacg

SEQ ID NO: 11446 - DNA, 20 bp, Artificial Sequence
  Primer
tggtgtctgcaaacagcacc

SEQ ID NO: 11447 - DNA, 21 bp, Artificial Sequence
  Primer
ccatgtacctggcaatgttgg

SEQ ID NO: 11448 - DNA, 20 bp, Artificial Sequence
  Primer
tacttcagcctgaggcacac

SEQ ID NO: 11449 - DNA, 20 bp, Artificial Sequence
  Primer
tcaaagccaatccacgcacg

SEQ ID NO: 11450 - DNA, 20 bp, Artificial Sequence
  Primer
tgtctgcaaacagcaccacc

SEQ ID NO: 11451 - DNA, 22 bp, Artificial Sequence
  Primer
ctctgaaggttacccgtaaagc

SEQ ID NO: 11452 - DNA, 20 bp, Artificial Sequence
  Primer
tggctgggtaacgatcaacg

SEQ ID NO: 11453 - DNA, 20 bp, Artificial Sequence
  Primer
atcaaagccaatccacgcac

SEQ ID NO: 11454 - DNA, 21 bp, Artificial Sequence
  Primer
ggtcatgtcctttgggtatgc

SEQ ID NO: 11455 - DNA, 22 bp, Artificial Sequence
  Primer
gcttagcccaaagctcaaatgc

SEQ ID NO: 11456 - DNA, 20 bp, Artificial Sequence
  Primer
gcatggtgtctgcaaacagc

SEQ ID NO: 11457 - DNA, 20 bp, Artificial Sequence
  Primer
aatccacgcacgaacgtgac

SEQ ID NO: 11458 - DNA, 21 bp, Artificial Sequence
  Primer
tccatgtacctggcaatgttg

SEQ ID NO: 11459 - DNA, 20 bp, Artificial Sequence
  Primer
cttcagcctgaggcacacac

SEQ ID NO: 11460 - DNA, 20 bp, Artificial Sequence
  Primer
ccaatccacgcacgaacgtg

SEQ ID NO: 11461 - DNA, 20 bp, Artificial Sequence
  Primer
gtgtctgcaaacagcaccac

SEQ ID NO: 11462 - DNA, 21 bp, Artificial Sequence
  Primer
tcggtactcatttgcatggtg

SEQ ID NO: 11463 - DNA, 20 bp, Artificial Sequence
  Primer
actaccaccatcacagcctg

SEQ ID NO: 11464 - DNA, 20 bp, Artificial Sequence
  Primer
aaactggtcacctggtggag

SEQ ID NO: 11465 - DNA, 20 bp, Artificial Sequence
  Primer
ccaaaggacgaacacgactc

SEQ ID NO: 11466 - DNA, 20 bp, Artificial Sequence
  Primer
aagccatgcgcccaaaggac

SEQ ID NO: 11467 - DNA, 21 bp, Artificial Sequence
  Primer
tcagcaagcaatgcagacttc

SEQ ID NO: 11468 - DNA, 23 bp, Artificial Sequence
  Primer
acactacttgtttgccatgagac

SEQ ID NO: 11469 - DNA, 20 bp, Artificial Sequence
  Primer
caaagccatgcgcccaaagg

SEQ ID NO: 11470 - DNA, 21 bp, Artificial Sequence
  Primer
tgtcagtcattgtgcagacac

SEQ ID NO: 11471 - DNA, 21 bp, Artificial Sequence
  Primer
acaaactaccaccatcacagc

SEQ ID NO: 11472 - DNA, 20 bp, Artificial Sequence
  Primer
aggacgaacacgactctgtc

SEQ ID NO: 11473 - DNA, 20 bp, Artificial Sequence
  Primer
cactacatggctgagcatcg

SEQ ID NO: 11474 - DNA, 20 bp, Artificial Sequence
  Primer
ctaccaccatcacagcctgg

SEQ ID NO: 11475 - DNA, 21 bp, Artificial Sequence
  Primer
caaaggacgaacacgactctg

SEQ ID NO: 11476 - DNA, 20 bp, Artificial Sequence
  Primer
tctacttcagcctgaggcac

SEQ ID NO: 11477 - DNA, 22 bp, Artificial Sequence
  Primer
caacataaccagtcggtacagc

SEQ ID NO: 11478 - DNA, 22 bp, Artificial Sequence
  Primer
gctttgtcactacatggctgag

SEQ ID NO: 11479 - DNA, 23 bp, Artificial Sequence
  Primer
gcatccaagtactgtcggtactc

SEQ ID NO: 11480 - DNA, 21 bp, Artificial Sequence
  Primer
aacccacagaatgattccagc

SEQ ID NO: 11481 - DNA, 22 bp, Artificial Sequence
  Primer
gtttaaactggtcacctggtgg

SEQ ID NO: 11482 - DNA, 20 bp, Artificial Sequence
  Primer
tgatggaaacaggtgcttcg

SEQ ID NO: 11483 - DNA, 22 bp, Artificial Sequence
  Primer
gcgcttaacaaagcactcatgg

SEQ ID NO: 11484 - DNA, 20 bp, Artificial Sequence
  Primer
agccatgcgcccaaaggacg

SEQ ID NO: 11485 - DNA, 20 bp, Artificial Sequence
  Primer
caccatcacagcctggtaag

SEQ ID NO: 11486 - DNA, 20 bp, Artificial Sequence
  Primer
gaatagcttcttcgcgggtg

SEQ ID NO: 11487 - DNA, 23 bp, Artificial Sequence
  Primer
gcaatgtcagtcattgtgcagac

SEQ ID NO: 11488 - DNA, 22 bp, Artificial Sequence
  Primer
gcaccacctaaattgcatcgtg

SEQ ID NO: 11489 - DNA, 20 bp, Artificial Sequence
  Primer
attgcattggctgggtaacg

SEQ ID NO: 11490 - DNA, 21 bp, Artificial Sequence
  Primer
actcatttgcatggtgtctgc

SEQ ID NO: 11491 - DNA, 20 bp, Artificial Sequence
  Primer
ggttacccgtaaagccccac

SEQ ID NO: 11492 - DNA, 20 bp, Artificial Sequence
  Primer
aagccaatccacgcacgaac

SEQ ID NO: 11493 - DNA, 23 bp, Artificial Sequence
  Primer
cgacactacttgtttgccatgag

SEQ ID NO: 11494 - DNA, 23 bp, Artificial Sequence
  Primer
cagcatctctagttgcatgacag

SEQ ID NO: 11495 - DNA, 23 bp, Artificial Sequence
  Primer
ctctacatcaaagccaatccacg

SEQ ID NO: 11496 - DNA, 20 bp, Artificial Sequence
  Primer
aaagctggagtgtggaatgc

SEQ ID NO: 11497 - DNA, 21 bp, Artificial Sequence
  Primer
gtcagtcattgtgcagacacc

SEQ ID NO: 11498 - DNA, 20 bp, Artificial Sequence
  Primer
ctagttgcatgacagccctc

SEQ ID NO: 11499 - DNA, 20 bp, Artificial Sequence
  Primer
tgcgcccaaaggacgaacac

SEQ ID NO: 11500 - DNA, 22 bp, Artificial Sequence
  Primer
ctacacacaattgcattggctg

SEQ ID NO: 11501 - DNA, 20 bp, Artificial Sequence
  Primer
atccacgcacgaacgtgacg

SEQ ID NO: 11502 - DNA, 22 bp, Artificial Sequence
  Primer
cgtttgtcacacagacaacacg

SEQ ID NO: 11503 - DNA, 24 bp, Artificial Sequence
  Primer
acacctgtagaaaatcctagctgg

SEQ ID NO: 11504 - DNA, 22 bp, Artificial Sequence
  Primer
cggtactcatttgcatggtgtc

SEQ ID NO: 11505 - DNA, 20 bp, Artificial Sequence
  Primer
gcccaaaggacgaacacgac

SEQ ID NO: 11506 - DNA, 21 bp, Artificial Sequence
  Primer
agaccaatcaacgcgcttaac

SEQ ID NO: 11507 - DNA, 20 bp, Artificial Sequence
  Primer
aggtctacctgtccttccac

SEQ ID NO: 11508 - DNA, 20 bp, Artificial Sequence
  Primer
aactggtcacctggtggagg

SEQ ID NO: 11509 - DNA, 22 bp, Artificial Sequence
  Primer
tgatgtaagctcaaagccatgc

SEQ ID NO: 11510 - DNA, 23 bp, Artificial Sequence
  Primer
gcatcgtgtaatacacgtagcag

SEQ ID NO: 11511 - DNA, 25 bp, Artificial Sequence
  Primer
tgagtatcttaatctctggcactgg

SEQ ID NO: 11512 - DNA, 20 bp, Artificial Sequence
  Primer
ttacgcttagcccaaagctc

SEQ ID NO: 11513 - DNA, 22 bp, Artificial Sequence
  Primer
gcatctctagttgcatgacagc

SEQ ID NO: 11514 - DNA, 21 bp, Artificial Sequence
  Primer
gtcactacatggctgagcatc

SEQ ID NO: 11515 - DNA, 22 bp, Artificial Sequence
  Primer
tccattctacttcagcctgagg

SEQ ID NO: 11516 - DNA, 21 bp, Artificial Sequence
  Primer
tttgtcactacatggctgagc

SEQ ID NO: 11517 - DNA, 21 bp, Artificial Sequence
  Primer
gcgcttaacaaagcactcatg

SEQ ID NO: 11518 - DNA, 21 bp, Artificial Sequence
  Primer
caattgcattggctgggtaac

SEQ ID NO: 11519 - DNA, 21 bp, Artificial Sequence
  Primer
ggtctacctgtccttccactc

SEQ ID NO: 11520 - DNA, 20 bp, Artificial Sequence
  Primer
gtaaagccccactgctgaac

SEQ ID NO: 11521 - DNA, 20 bp, Artificial Sequence
  Primer
cactacattccagggcaagc

SEQ ID NO: 11522 - DNA, 20 bp, Artificial Sequence
  Primer
gcgcccaaaggacgaacacg

SEQ ID NO: 11523 - DNA, 20 bp, Artificial Sequence
  Primer
cacacaattgcattggctgg

SEQ ID NO: 11524 - DNA, 21 bp, Artificial Sequence
  Primer
aggtaggttagtacccacagc

SEQ ID NO: 11525 - DNA, 20 bp, Artificial Sequence
  Primer
gttgcatgacagccctctac

SEQ ID NO: 11526 - DNA, 23 bp, Artificial Sequence
  Primer
gtcaacataaccagtcggtacag

SEQ ID NO: 11527 - DNA, 21 bp, Artificial Sequence
  Primer
ccacagaatgattccagcagg

SEQ ID NO: 11528 - DNA, 20 bp, Artificial Sequence
  Primer
ttacccgtaaagccccactg

SEQ ID NO: 11529 - DNA, 23 bp, Artificial Sequence
  Primer
ggaaacttatcagcaagcaatgc

SEQ ID NO: 11530 - DNA, 25 bp, Artificial Sequence
  Primer
catagagatgagtctacggtaggtc

SEQ ID NO: 11531 - DNA, 24 bp, Artificial Sequence
  Primer
ctcagtaggtttcttggcaatgtc

SEQ ID NO: 11532 - DNA, 24 bp, Artificial Sequence
  Primer
acttccattctacttcagcctgag

SEQ ID NO: 11533 - DNA, 23 bp, Artificial Sequence
  Primer
cctctacatcaaagccaatccac

SEQ ID NO: 11534 - DNA, 22 bp, Artificial Sequence
  Primer
ccctctacatcaaagccaatcc

SEQ ID NO: 11535 - DNA, 22 bp, Artificial Sequence
  Primer
ccgacactacttgtttgccatg

SEQ ID NO: 11536 - DNA, 20 bp, Artificial Sequence
  Primer
cccgtaaagccccactgctg

SEQ ID NO: 11537 - DNA, 20 bp, Artificial Sequence
  Primer
tacatgtgctggggcttctc

SEQ ID NO: 11538 - DNA, 20 bp, Artificial Sequence
  Primer
catgcgcccaaaggacgaac

SEQ ID NO: 11539 - DNA, 20 bp, Artificial Sequence
  Primer
gatacatgtgctggggcttc

SEQ ID NO: 11540 - DNA, 20 bp, Artificial Sequence
  Primer
gcttcgccggcgtgtccatc

SEQ ID NO: 11541 - DNA, 24 bp, Artificial Sequence
  Primer
gcaagcagaattaaccctcagttc

SEQ ID NO: 11542 - DNA, 23 bp, Artificial Sequence
  Primer
ggtaggttagtacccacagcatc

SEQ ID NO: 11543 - DNA, 25 bp, Artificial Sequence
  Primer
gtaagtgaagaacaagcactctcag

SEQ ID NO: 11544 - DNA, 23 bp, Artificial Sequence
  Primer
ttttatcgaaagctggagtgtgg

SEQ ID NO: 11545 - DNA, 20 bp, Artificial Sequence
  Primer
tacccgtaaagccccactgc

SEQ ID NO: 11546 - DNA, 24 bp, Artificial Sequence
  Primer
gaacttccattctacttcagcctg

SEQ ID NO: 11547 - DNA, 24 bp, Artificial Sequence
  Primer
gcacttttatcgaaagctggagtg

SEQ ID NO: 11548 - DNA, 20 bp, Artificial Sequence
  Primer
gcactacattccagggcaag

SEQ ID NO: 11549 - DNA, 25 bp, Artificial Sequence
  Primer
tctaaaaaggtctacctgtccttcc

SEQ ID NO: 11550 - DNA, 24 bp, Artificial Sequence
  Primer
tgtagaaaatcctagctggagagg

SEQ ID NO: 11551 - DNA, 25 bp, Artificial Sequence
  Primer
cctgtagaaaatcctagctggagag

SEQ ID NO: 11552 - protein, 481 aa, SARS coronavirus; identical to SEQ ID NO: 10210

SEQ ID NO: 11553 - protein, 5 aa, SARS coronavirus
YSYAI

SEQ ID NO: 11554 - protein, 5 aa, SARS coronavirus
SYAIH

SEQ ID NO: 11555 - protein, 5 aa, SARS coronavirus
YAIHH

SEQ ID NO: 11556 - protein, 5 aa, SARS coronavirus
IHHDK

SEQ ID NO: 11557 - protein, 4 aa, SARS coronavirus
SYAI

SEQ ID NO: 11558 - protein, 4 aa, SARS coronavirus
YAIH

SEQ ID NO: 11559 - protein, 4 aa, SARS coronavirus
AIHH

SEQ ID NO: 11560 - protein, 4 aa, SARS coronavirus
IHHD

SEQ ID NO: 11561 - protein, 34 aa, SARS coronavirus
MSDNGPQSNQRSAPRITFGGPTDSTDNNQNGGRN

SEQ ID NO: 11562 - protein, 31 aa, SARS coronavirus
MDPNQTNVVPPALHLVDPQIQLTITRMEDCN

SEQ ID NO: 11563 - DNA, 1680 bp, SARS coronavirus
tgaggactcgagctcaagctttaattgacttctatttgtgctttttagcctttctgctattccttgttttaataatgcttattatattttggttttcactcgaaatccaggatctagaagaaccttgtaccaaagtctaaacgaacatgaaacttctcattgttttgacttgtatttctctatgcagttgcatatgcactgtagtacagcgctgtgcatctaataaacctcatgtgcttgaagatccttgtaaggtacaacactaggggtaatacttatagcactgcttggctttgtgctctaggaaaggttttaccttttcatagatggcacactatggttcaaacatgcacacctaatgttactatcaactgtcaagatccagctggtggtgcgcttatagctaggtgttggtaccttcatgaaggtcaccaaactgctgcatttagagacgtacttgttgttttaaataaacgaacaaattaaaatgtctgataatggaccccaatcaaaccaacgtagtgccccccgcattacatttggtggacccacagattcaactgacaataaccagaatggaggacgcaatggggcaaggccaaaacagcgccgaccccaaggtttacccaataatattgcgtcttggttcacagctctcactcagcatggcaaggaggaacttagattccctcgaggccagggcgttccaatcaacaccaatagtggtccagatgaccaaattggctactaccgaagagctacccgacgagttcgtggtggtgacggcaaaatgaaagagctcagccccagatggtacttctattacctaggaactggcccagaagcttcacttccctacggcgctaacaaagaaggcatcgtatgggttgcaactgagggagccttgaatacacccaaagaccacattggcacccgcaatcctaataacaatgctgccaccgtgctacaacttcctcaaggaacaacattgccaaaaggcttctacgcagagggaagcagaggcggcagtcaagcctcttctcgctcctcatcacgtagtcgcggtaattcaagaaattcaactcctggcagcagtaggggaaattctcctgctcgaatggctagcggaggtggtgaaactgccctcgcgctattgctgctagacagattgaaccagcttgagagcaaagtttctggtaaaggccaacaacaacaaggccaaactgtcactaagaaatctgctgctgaggcatctaaaaagcctcgccaaaaacgtactgccacaaaacagtacaacgtcactcaagcatttgggagacgtggtccagaacaaacccaaggaaatttcggggaccaagacctaatcagacaaggaactgattacaaacattggccgcaaattgcacaatttgctccaagtgcctctgcattctttggaatgtcacgcattggcatggaagtcacaccttcgggaacatggctgacttatcatggagccattaaattggatgacaaagatccacaattcaaagacaacgtcatactgctgaacaagcacattgacgcatacaaaacattcccaccaacagagcctaaaaaggacaaaaagaaaaagactgatgaagctcagcctttgccgcagagacaaaagaagcagcccactgtgactcttcttcctgc

SEQ ID NO: 11564 - protein, 6 aa, Artificial Sequence
  Inferred translation product
GLELKL

SEQ ID NO: 11565 - protein, 7 aa, Artificial Sequence
  Inferred translation product
LTSICAF

SEQ ID NO: 11566 - protein, 7 aa, Artificial Sequence
  Inferred translation product
PFCYSLF

SEQ ID NO: 11567 - protein, 13 aa, Artificial Sequence
  Inferred translation product
CLLYFGFHSKSRI

SEQ ID NO: 11568 - protein, 10 aa, Artificial Sequence
  Inferred translation product
KNLVPKSKRT

SEQ ID NO: 11569 - protein, 5 aa, Artificial Sequence
  Inferred translation product
NFSLF

SEQ ID NO: 11570 - protein, 11 aa, Artificial Sequence
  Inferred translation product
LVFLYAVAYAL

SEQ ID NO: 11571 - protein, 93 aa, Artificial Sequence; identical to SEQ ID NO: 7150
  Inferred translation product

SEQ ID NO: 11572 - protein, 7 aa, Artificial Sequence
  Inferred translation product
WTPIKPT

SEQ ID NO: 11573 - protein, 13 aa, Artificial Sequence
  Inferred translation product
CPPHYIWWTHRFN

SEQ ID NO: 11574 - protein, 20 aa, Artificial Sequence
  Inferred translation product
PEWRTQWGKAKTAPTPRFTQ

SEQ ID NO: 11575 - protein, 16 aa, Artificial Sequence
  Inferred translation product
YCVLVHSSHSAWQGGT

SEQ ID NO: 11576 - protein, 12 aa, Artificial Sequence
  Inferred translation product
IPSRPGRSNQHQ

SEQ ID NO: 11577 - protein, 15 aa, Artificial Sequence
  Inferred translation product
PNWLLPKSYPTSSWW

SEQ ID NO: 11578 - protein, 27 aa, Artificial Sequence
  Inferred translation product
RQNERAQPQMVLLLPRNWPRSFTSLRR

SEQ ID NO: 11579 - protein, 9 aa, Artificial Sequence
  Inferred translation product
QRRHRMGCN

SEQ ID NO: 11580 - protein, 15 aa, Artificial Sequence
  Inferred translation product
GSLEYTQRPHWHPQS

SEQ ID NO: 11581 - protein, 36 aa, Artificial Sequence; identical to SEQ ID NO: 7160
  Inferred translation product

SEQ ID NO: 11582 - protein, 9 aa, Artificial Sequence
  Inferred translation product
FKKFNSWQQ

SEQ ID NO: 11583 - protein, 8 aa, Artificial Sequence
  Inferred translation product
GKFSCSNG

SEQ ID NO: 11584 - protein, 14 aa, Artificial Sequence
  Inferred translation product
NCPRAIAARQIEPA

SEQ ID NO: 11585 - protein, 5 aa, Artificial Sequence
  Inferred translation product
EQSFW

SEQ ID NO: 11586 - protein, 10 aa, Artificial Sequence
  Inferred translation product
RPTTTRPNCH

SEQ ID NO: 11587 - protein, 4 aa, Artificial Sequence
  Inferred translation product
EICC

SEQ ID NO: 11588 - protein, 40 aa, Artificial Sequence; identical to SEQ ID NO: 7167
  Inferred translation product

SEQ ID NO: 11589 - protein, 40 aa, Artificial Sequence; identical to SEQ ID NO: 7168
  Inferred translation product

SEQ ID NO: 11590 - protein, 16 aa, Artificial Sequence
  Inferred translation product
QRSTIQRQRHTAEQAH

SEQ ID NO: 11591 - protein, 10 aa, Artificial Sequence
  Inferred translation product
RIQNIPTNRA

SEQ ID NO: 11592 - protein, 7 aa, Artificial Sequence
  Inferred translation product
KGQKEKD

SEQ ID NO: 11593 - protein, 19 aa, Artificial Sequence
  Inferred translation product
SSAFAAETKEAAHCDSSSC

SEQ ID NO: 11594 - protein, 8 aa, Artificial Sequence
  Inferred translation product
EDSSSSFN

SEQ ID NO: 11595 - protein, 64 aa, Artificial Sequence; identical to SEQ ID NO: 6797
  Inferred translation product

SEQ ID NO: 11596 - protein, 4 aa, Artificial Sequence
  Inferred translation product
TSCA

SEQ ID NO: 11597 - protein, 16 aa, Artificial Sequence
  Inferred translation product
GTTLGVILIALLGFVL

SEQ ID NO: 11598 - protein, 32 aa, Artificial Sequence; identical to SEQ ID NO: 6800
  Inferred translation product

SEQ ID NO: 11599 - protein, 21 aa, Artificial Sequence
  Inferred translation product
LGVGTFMKVTKLLHLETYLLF

SEQ ID NO: 11600 - protein, 403 aa, Artificial Sequence
  Inferred translation product
INEQIKMSDNGPQSNQRSAPRITFGGPTDSTDNNQNGGRNGARPKQRRPQGLPNNIASWFTALTQHGKEELRFPRGQGVPINTNSGPDDQIGYYRRATRRVRGGDGKMKELSPRWYFYYLGTGPEASLPYGANKEGIVWVATEGALNTPKDHIGTRNPNNNAATVLQLPQGTTLPKGFYAEGSRGGSQASSRSSSRSRGNSRNSTPGSSRGNSPARMASGGGETALALLLLDRLNQLESKVSGKGQQQQGQTVTKKSAAEASKKPRQKRTATKQYNVTQAFGRRGPEQTQGNFGDQDLIRQGTDYKHWPQIAQFAPSASAFFGMSRIGMEVTPSGTWLTYHGAIKLDDKDPQFKDNVILLNKHIDAYKTFPPTEPKKDKKKKTDEAQPLPQRQKKQPTVTLLP

SEQ ID NO: 11601 - protein, 45 aa, Artificial Sequence
  Inferred translation product
RTRAQALIDFYLCFLAFLLFLVLIMLIIFWFSLEIQDLEEPCTKV

SEQ ID NO: 11602 - protein, 41 aa, Artificial Sequence
  Inferred translation product
TNMKLLIVLTCISLCSCICTVVQRCASNKPHVLEDPCKVQH

SEQ ID NO: 11603 - protein, 14 aa, Artificial Sequence
  Inferred translation product
HCLALCSRKGFTFS

SEQ ID NO: 11604 - protein, 10 aa, Artificial Sequence
  Inferred translation product
MAHYGSNMHT

SEQ ID NO: 11605 - protein, 15 aa, Artificial Sequence
  Inferred translation product
CYYQLSRSSWWCAYS

SEQ ID NO: 11606 - protein, 5 aa, Artificial Sequence
  Inferred translation product
VLVPS

SEQ ID NO: 11607 - protein, 7 aa, Artificial Sequence
  Inferred translation product
RSPNCCI

SEQ ID NO: 11608 - protein, 7 aa, Artificial Sequence
  Inferred translation product
RRTCCFK

SEQ ID NO: 11609 - protein, 106 aa, Artificial Sequence
  Inferred translation product
TNKLKCLIMDPNQTNVVPPALHLVDPQIQLTITRMEDAMGQGQNSADPKVYPIILRLGSQLSLSMARRNLDSLEARAFQSTPIVVQMTKLATTEELPDEFVVVTAK

SEQ ID NO: 11610 - protein, 11 aa, Artificial Sequence
  Inferred translation product
KSSAPDGTSIT

SEQ ID NO: 11611 - protein, 25 aa, Artificial Sequence
  Inferred translation product
ELAQKLHFPTALTKKASYGLQLREP

SEQ ID NO: 11612 - protein, 84 aa, Artificial Sequence; identical to SEQ ID NO: 10512
  Inferred translation product

SEQ ID NO: 11613 - protein, 63 aa, Artificial Sequence; identical to SEQ ID NO: 10513
  Inferred translation product

SEQ ID NO: 11614 - protein, 39 aa, Artificial Sequence
  Inferred translation product
SDKELITNIGRKLHNLLQVPLHSLECHALAWKSHLREHG

SEQ ID NO: 11615 - protein, 21 aa, Artificial Sequence
  Inferred translation product
LIMEPLNWMTKIHNSKTTSYC

SEQ ID NO: 11616 - protein, 38 aa, Artificial Sequence
  Inferred translation product
TSTLTHTKHSHQQSLKRTKRKRLMKLSLCRRDKRSSPL

SEQ ID NO: 11617 - protein, 4 aa, Artificial Sequence
  Inferred translation product
LFFL

SEQ ID NO: 11618 - protein, 397 aa, SARS coronavirus
MSDNGPQSNQRSAPRITFGGPTDSTDNNQNGGRNGARPKQRRPQGLPNNIASWFTALTQHGKEELRFPRGQGVPINTNSGPDDQIGYYRRATRRVRGGDGKMKELSPRWYFYYLGTGPEASLPYGANKEGIVWVATEGALNTPKDHIGTRNPNNNAATVLQLPQGTTLPKGFYAEGSRGGSQASSRSSSRSRGNSRNSTPGSSRGNSPARMASGGGETALALLLLDRLNQLESKVSGKGQQQQGQTVTKKSAAEASKKPRQKRTATKQYNVTQAFGRRGPEQTQGNFGDQDLIRQGTDYKHWPQIAQFAPSASAFFGMSRIGMEVTPSGTWLTYHGAIKLDDKDPQFKDNVILLNKHIDAYKTFPPTEPKKDKKKKTDEAQPLPQRQKKQPTVTLLP

SEQ ID NO: 11619 - protein, 98 aa, SARS coronavirus; identical to SEQ ID NO: 9966

SEQ ID NO: 11620 - protein, 1125 aa, SARS coronavirus; identical to SEQ ID NO: 7190

SEQ ID NO: 11621 - protein, 5 aa, SARS coronavirus
YAIHH

SEQ ID NO: 11622 - protein, 5 aa, SARS coronavirus
YATHH

SEQ ID NO: 11623 - protein, 5 aa, SARS coronavirus
ASQAW

SEQ ID NO: 11624 - protein, 5 aa, SARS coronavirus
ASRAW

SEQ ID NO: 11625 - protein, 5 aa, SARS coronavirus
DADST

SEQ ID NO: 11626 - protein, 5 aa, SARS coronavirus
DAYST

SEQ ID NO: 11627 - protein, 1255 aa, SARS coronavirus; identical to SEQ ID NO: 9962

SEQ ID NO: 11628 - protein, 5 aa, SARS coronavirus
PCSFG

SEQ ID NO: 11629 - protein, 5 aa, SARS coronavirus
PCAFG

SEQ ID NO: 11630 - protein, 221 aa, SARS coronavirus; identical to SEQ ID NO: 9963

SEQ ID NO: 11631 - protein, 5 aa, SARS coronavirus
LAVVY

SEQ ID NO: 11632 - protein, 5 aa, SARS coronavirus
LAAVY

SEQ ID NO: 11633 - protein, 397 aa, SARS coronavirus; identical to SEQ ID NO: 11618

SEQ ID NO: 11634 - protein, 5 aa, SARS coronavirus
NNIAS

SEQ ID NO: 11635 - protein, 5 aa, SARS coronavirus
NNTAS

SEQ ID NO: 11636 - protein, 2712 aa, SARS coronavirus
PTPRTLDAVCGCINVFKRVCGVSAARLTPCGTGTSTDVVYRAFDIYNEKVAGFAKFLKTNCCRFQEKDEEGNLLDSYFVVKRHTMSNYQHEETIYNLVKDCPAVAVHDFFKFRVDGDMVPHISRQRLTKYTMADLVYALRHFDEGNCDTLKEILVTYNCCDDDYFNKKDWYDFVENPDILRVYANLGERVRQSLLKTVQFCDAMRDAGIVGVLTLDNQDLNGNWYDFGDFVQVAPGCGVPIVDSYYSLLMPILTLTRALAAESHMDADLAKPLIKWDLLKYDFTEERLCLFDRYFKYWDQTYHPNCINCLDDRCILHCANFNVLFSTVFPPTSFGPLVRKIFVDGVPFVVSTGYHFRELGVVHNQDVNLHSSRLSFKELLVYAADPAMHAASGNLLLDKRTTCFSVAALTNNVAFQTVKPGNFNKDFYDFAVSKGFFKEGSSVELKHFFFAQDGNAAISDYDYYRYNLPTMCDIRQLLFVVEVVDKYFDCYDGGCINANQVIVNNLDKSAGFPFNKWGKARLYYDSMSYEDQDALFAYTKRNVIPTITQMNLKYAISAKNRARTVAGVSICSTMTNRQFHQKLLKSIAATRGATVVIGTSKFYGGWHNMLKTVYSDVETPHLMGWDYPKCDRAMPNMLRIMASLVLARKHNTCCNLSHRFYRLANECAQVLSEMVMCGGSLYVKPGGTSSGDATTAYANSVFNICQAVTANVNALLSTDGNKIADKYVRNLQHRLYECLYRNRDVDHEFVDEFYAYLRKHFSMMILSDDAVVCYNSNYAAQGLVASIKNFKAVLYYQNNVFMSEAKCWTETDLTKGPHEFCSQHTMLVKQGDDYVYLPYPDPSRILGAGCFVDDIVKTDGTLMIERFVSLAIDAYPLTKHPNQEYADVFHLYLQYIRKLHDELTGHMLDMYSVMLTNDNTSRYWEPEFYEAMYTPHTVLQAVSACVLCNSQTSLRCGACIRRPFLCCKCCYDHVISTSHKLVLSVNPYVCNAPGCDVTDVTQLYLGGMSYYCKSHKPPISFPLCANGQVFGLYKNTCVGSDNVTDFNAIATCDWTNAGDYILANTCTERLKLFAAETLKATEETFKLSYGIATVREVLSDRELHLSWEVGKPRPPLNRNYVFTGYRVTKNSKVQIGEYTFEKGDYGDAVVYRGTTTYKLNVGDYFVLTSHTVMPLSAPTLVPQEHYVRITGLYPTLNISDEFSSNVANYQKVGMQKYSTLQGPPGTGKSHFAIGLALYYPSARIVYTACSHAAVDALCEKALKYLPIDKCSRIIPARARVECFDKFKVNSTLEQYVFCTVNALPETTADIVVFDEISMATNYDLSVVNARLRAKHYVYIGDPAQLPAPRTLLTKGTLEPEYFNSVCRLMKTIGPDMFLGTCRRCPAEIVDTVSALVYDNKLKAHKDKSAQCFKMFYKGVITHDVSSAINRPQIGVVREFLTRNPAWRKAVFISPYNSQNAVASKILGLPTQTVDSSQGSEYDYVIFTQTTETAHSCNVNRFNVAITRAKIGILCIMSDRDLYDKLQFTSLEIPRRNVATLQAENVTGLFKDCSKIITGLHPTQAPTHLSVDIKFKTEGLCVDIPGIPKDMTYRRLISMMGFKMNYQVNGYPNMFITREEAIRHVRAWIGFDVEGCHATRDAVGTNLPLQLGFSTGVNLVAVPTGYVDTENNTEFTRVNAKPPPGDQFKHLIPLMYKGLPWNVVRIKIVQMLSDTLKGLSDRVVFVLWAHGFELTSMKYFVKIGPERTCCLCDKRATCFSTSSDTYACWNHSVGFDYVYNPFMIDVQQWGFTGNLQSNHDQHCQVHGNAHVASCDAIMTRCLAVHECFVKRVDWSVEYPIIGDELRVNSACRKVQHMVVKSALLADKFPVLHDIGNPKAIKCVPQAEVEWKFYDAQPCSDKAYKIEELFYSYATHHDKFTDGVCLFWNCNVDRYPANAIVCRFDTRVLSNLNLPGCDGGSLYVNKHAFHTPAFDKSAFTNLKQLPFFYYSDSPCESHGKQVVSDIDYVPLKSATCITRCNLGGAVCRHHANEYRQYLDAYNMMISAGFSLWIYKQFDTYNLWNTFTRLQSLENVAYNVVNKGHFDGHAGEAPVSIINNAVYTKVDGIDVEIFENKTTLPVNVAFELWAKRNIKPVPEIKILNNLGVDIAANTVIWDYKREAPAHVSTIGVCTMTDIAKKPTESACSSLTVLFDGRVEGQVDLFRNARNGVLITEGSVKGLTPSKGPAQASVNGVTLIGESVKTQFNYFKKVDGIIQQLPETYFTQSRDLEDFKPRSQMETDFLELAMDEFIQRYKLEGYAFEHIVYGDFSHGQLGGLHLMIGLAKRSQDSPLKLEDFIPMDSTVKNYFITDAQTGSSKCVCSVIDLLLDDFVEIIKSQDLSVISKVVKVTIDYAEISFMLWCKDGHVETFYPKLQASRAWQPGVAMPNLYKMQRMLLEKCDLQNYGENAVIPKGIMMNVAKYTQLCQYLNTLTLAVPYNMRVIHFGAGSDKGVAPGTAVLRQWLPTGTLLVDSDLNDFVSDAYSTLIGDCATVHTANKWDLIISDMYDPRTKHVTKENDSKEGFFTYLCGFIKQKLALGGSIAVKITEHSWNADLYKLMGHFSWWTAFVTNVNASSSEAFLIGANYLGKPKEQIDGYTMHANYIFWRNTNPIQLSSYSLFDMSKFPLKLRGTAVMSLKENQINDMIYSLLEKGRLIIRENNRVVVSSDILVNN

SEQ ID NO: 11637 - protein, 5 aa, SARS coronavirus
AVSAC

SEQ ID NO: 11638 - protein, 5 aa, SARS coronavirus
AVGAC

SEQ ID NO: 11639 - DNA, 11207 bp, SARS coronavirus
caaaggacatgacctaccgtagactcatctctatgatgggtttcaaaatgaattaccaagtcaatggttaccctaatatgtttatcacccgcgaagaagctattcgtcacgttcgtgcgtggattggctttgatgtagagggctgtcatgcaactagagatgctgtgggtactaacctacctctccagctaggattttctacaggtgttaacttagtagctgtaccgactggttatgttgacactgaaaataacacagaattcaccagagttaatgcaaaacctccaccaggtgaccagtttaaacatcttataccactcatgtataaaggcttgccctggaatgtagtgcgtattaagatagtacaaatgctcagtgatacactgaaaggattgtcagacagagtcgtgttcgtcctttgggcgcatggctttgagcttacatcaatgaagtactttgtcaagattggacctgaaagaacgtgttgtctgtgtgacaaacgtgcaacttgcttttctacttcatcagatacttatgcctgctggaatcattctgtgggttttgactatgtctataacccatttatgattgatgttcagcagtggggctttacgggtaaccttcagagtaaccatgaccaacattgccaggtacatggaaatgcacatgtggctagttgtgatgctatcatgactagatgtttagcagtccatgagtgctttgttaagcgcgttgattggtctgttgaataccctattataggagatgaactgagggttaattctgcttgcagaaaagtacaacacatggttgtgaagtctgcattgcttgctgataagtttccagttcttcatgacataggaaatccaaaggctatcaagtgtgtgcctcaggctgaagtagaatggaagttctacgatgctcagccatgtagtgacaaagcttacaaaatagaggaactcttctattcttatgctatacatcacgataaattcactgatggtgtttgtttgttttggaattgtaacgttgatcgttacccagccaatgcaattgtgtgtaggtttgacacaagagtcttgtcaaacttgaacttaccaggctgtgatggtggtagtttgtatgtgaataagcatgcattccacactccagctttcgataaaagtgcatttactaatttaaagcaattgcctttcttttactattctgatagtccttgtgagtctcatggcaaacaagtagtgtcggatattgattatgttccactcaaatctgctacgtgtattacacgatgcaatttaggtggtgctgtttgcagacaccatgcaaatgagtaccgacagtacttggatgcatataatatgatgatttctgctggatttagcctatggatttacaaacaatttgatacttataacctgtggaatacatttaccaggttacagagtttagaaaatgtggcttataatgttgttaataaaggacactttgatggacacgccggcgaagcacctgtttccatcattaataatgctgtttacacaaaggtagatggtattgatgtggagatctttgaaaataagacaacacttcctgttaatgttgcatttgagctttgggctaagcgtaacattaaaccagtgccagagattaagatactcaataatttgggtgttgatatcgctgctaatactgtaatctgggactacaaaagagaagccccagcacatgtatctacaataggtgtctgcacaatgactgacattgccaagaaacctactgagagtgcttgttcttcacttactgtcttgtttgatggtagagtggaaggacaggtagacctttttagaaacgcccgtaatggtgttttaataacagaaggttcagtcaaaggtctaacaccttcaaagggaccagcacaagctagcgtcaatggagtcacattaattggagaatcagtaaaaacacagtttaactactttaagaaagtagacggcattattcaacagttgcctgaaacctactttactcagagcagagacttagaggattttaagcccagatcacaaatggaaactgactttctcgagctcgctatggatgaattcatacagcgatataagctcgagggctatgccttcgaacacatcgtttatggagatttcagtcatggacaacttggcggtcttcatttaatgataggcttagccaagcgctcacaagattcaccacttaaattagaggattttatccctatggacagcacagtgaaaaattacttcataacagatgcgcaaacaggttcatcaaaatgtgtgtgttctgtgattgatcttttacttgatgactttgtcgagataataaagtcacaagatttgtcagtgatttcaaaagtggtcaaggttacaattgactatgctgaaatttcattcatgctttggtgtaaggatggacatgttgaaaccttctacccaaaactacaagcaagtcaagcgtggcaaccaggtgttgcgatgcctaacttgtacaagatgcaaagaatgcttcttgaaaagtgtgaccttcagaattatggtgaaaatgctgttataccaaaaggaataatgatgaatgtcgcaaagtatactcaactgtgtcaatacttaaatacacttactttagctgtaccctacaacatgagagttattcactttggtgctggctctgataaaggagttgcaccaggtacagctgtgctcagacaatggttgccaactggcacactacttgtcgattcagatcttaatgacttcgtctccgacgcagattctactttaattggagactgtgcaacagtacatacggctaataaatgggaccttattattagcgatatgtatgaccctaggaccaaacatgtgacaaaagagaatgactctaaagaagggtttttcacttatctgtgtggatttataaagcaaaaactagccctgggtggttctatagctgtaaagataacagagcattcttggaatgctgacctttacaagcttatgggccatttctcatggtggacagcttttgttacaaatgtaaatgcatcatcatcggaagcatttttaattggggctaactatcttggcaagccgaaggaacaaattgatggctataccatgcatgctaactacattttctggaggaacacaaatcctatccagttgtcttcctattcactctttgacatgagcaaatttcctcttaaattaagaggaactgctgtaatgtctcttaaggagaatcaaatcaatgatatgatttattctcttctggaaaaaggtaggcttatcattagagaaaacaacagagttgtggtttcaagtgatattcttgttaacaactaaacgaacatgtttattttcttattatttcttactctcactagtggtagtgaccttgaccggtgcaccacttttgatgatgttcaagctcctaattacactcaacatacttcatctatgaggggggtttactatcctgatgaaatttttagatcagacactctttatttaactcaggatttatttcttccattttattctaatgttacagggtttcatactattaatcatacgtttggcaaccctgtcataccttttaaggatggtatttattttgctgccacagagaaatcaaatgttgtccgtggttgggtttttggttctaccatgaacaacaagtcacagtcggtgattattattaacaattctactaatgttgttatacgagcatgtaactttgaattgtgtgacaaccctttctttgctgtttctaaacccatgggtacacagacacatactatgatattcgataatgcatttaattgcactttcgagtacatatctgatgccttttcgcttgatgtttcagaaaagtcaggtaattttaaacacttacgagagtttgtgtttaaaaataaagatgggtttctctatgtttataagggctatcaacctatagatgtagttcgtgatctaccttctggttttaacactttgaaacctatttttaagttgcctcttggtattaacattacaaattttagagccattcttacagccttttcacctgctcaagacatttggggcacgtcagctgcagcctattttgttggctatttaaagccaactacatttatgctcaagtatgatgaaaatggtacaatcacagatgctgttgattgttctcaaaatccacttgctgaactcaaatgctctgttaagagctttgagattgacaaaggaatttaccagacctctaatttcagggttgttccctcaggagatgttgtgagattccctaatattacaaacttgtgtccttttggagaggtttttaatgctactaaattcccttctgtctatgcatgggagagaaaaaaaatttctaattgtgttgctgattactctgtgctctacaactcaacatttttttcaacctttaagtgctatggcgtttctgccactaagttgaatgatctttgcttctccaatgtctatgcagattcttttgtagtcaagggagatgatgtaagacaaatagcgccaggacaaactggtgttattgctgattataattataaattgccagatgatttcatgggttgtgtccttgcttggaatactaggaacattgatgctacttcaactggtaattataattataaatataggtatcttagacatggcaagcttaggccctttgagagagacatatctaatgtgcctttctcccctgatggcaaaccttgcaccccacctgctcttaattgttattggccattaaatgattatggtttttacaccactactggcattggctaccaaccttacagagttgtagtactttcttttgaacttttaaatgcaccggccacggtttgtggaccaaaattatccactgaccttattaagaaccagtgtgtcaattttaattttaatggactcactggtactggtgtgttaactccttcttcaaagagatttcaaccatttcaacaatttggccgtgatgtttctgatttcactgattccgttcgagatcctaaaacatctgaaatattagacatttcaccttgctcttttgggggtgtaagtgtaattacacctggaacaaatgcttcatctgaagttgctgttctatatcaagatgttaactgcactgatgtttctacagcaattcatgcagatcaactcacaccagcttggcgcatatattctactggaaacaatgtattccagactcaagcaggctgtcttataggagctgagcatgtcgacacttcttatgagtgcgacattcctattggagctggcatttgtgctagttaccatacagtttctttattacgtagtactagccaaaaatctattgtggcttatactatgtctttaggtgctgatagttcaattgcttactctaataacaccattgctatacctactaacttttcaattagcattactacagaagtaatgcctgtttctatggctaaaacctccgtagattgtaatatgtacatctgcggagattctactgaatgtgctaatttgcttctccaatatggtagcttttgcacacaactaaatcgtgcactctcaggtattgctgctgaacaggatcgcaacacacgtgaagtgttcgctcaagtcaaacaaatgtacaaaaccccaactttgaaatattttggtggttttaatttttcacaaatattacctgaccctctaaagccaactaagaggtcttttattgaggacttgctctttaataaggtgacactcgctgatgctggcttcatgaagcaatatggcgaatgcctaggtgatattaatgctagagatctcatttgtgcgcagaagttcaatggacttacagtgttgccacctctgctcactgatgatatgattgctgcctacactgctgctctagttagtggtactgccactgctggatggacatttggtgctggcgctgctcttcaaataccttttgctatgcaaatggcatataggttcaatggcattggagttacccaaaatgttctctatgagaaccaaaaacaaatcgccaaccaatttaacaaggcgattagtcaaattcaagaatcacttacaacaacatcaactgcattgggcaagctgcaagacgttgttaaccagaatgctcaagcattaaacacacttgttaaacaacttagctctaattttggtgcaatttcaagtgtgctaaatgatatcctttcgcgacttgataaagtcgaggcggaggtacaaattgacaggttaattacaggcagacttcaaagccttcaaacctatgtaacacaacaactaatcagggctgctgaaatcagggcttctgctaatcttgctgctactaaaatgtctgagtgtgttcttggacaatcaaaaagagttgacttttgtggaaagggctaccaccttatgtccttcccacaagcagccccgcatggtgttgtcttcctacatgtcacgtatgtgccatcccaggagaggaacttcaccacagcgccagcaatttgtcatgaaggcaaagcatacttccctcgtgaaggtgtttttgtgtttaatggcacttcttggtttattacacagaggaacttcttttctccacaaataattactacagacaatacatttgtctcaggaaattgtgatgtcgttattggcatcattaacaacacagtttatgatcctctgcaacctgagcttgactcattcaaagaagagctggacaagtacttcaaaaatcatacatcaccagatgttgattttggcgacatttcaggcattaacgcttctgtcgtcaacattcaaaaagaaattgaccgcctcaatgaggtcgctaaaaatttaaatgaatcactcattgaccttcaagaattgggaaaatatgagcaatatattaaatggccttggtatgtttggctcggcttcattgctggactaattgccatcgtcatggttacaatcttgctttgttgcatgactagttgttgcagttgcctcaagggtgcatgctcttgtggttcttgctgcaagtttgatgaggatgactctgagccagttctcaagggtgtcaaattacattacacataaacgaacttatggatttgtttatgagattttttactcttggatcaattactgcacagccagtaaaaattgacaatgcttctcctgcaagtactgttcatgctacagcaacgataccgctacaagcctcactccctttcggatggcttgttattggcgttgcatttcttgctgtttttcagagcgctaccaaaataattgcgctcaataaaagatggcagctagccctttataagggcttccagttcatttgcaatttactgctgctatttgttaccatctattcacatcttttgcttgtcgctgcaggtatggaggcgcaatttttgtacctctatgccttgatatattttctacaatgcatcaacgcatgtagaattattatgagatgttggctttgttggaagtgcaaatccaagaacccattactttatgatgccaactactttgtttgctggcacacacataactatgactactgtataccatataacagtgtcacagatacaattgtcgttactgaaggtgacggcatttcaacaccaaaactcaaagaagactaccaaattggtggttattctgaggataggcactcaggtgttaaagactatgtcgttgtacatggctatttcaccgaagtttactaccagcttgagtctacacaaattactacagacactggtattgaaaatgctacattcttcatctttaacaagcttgttaaagacccaccgaatgtgcaaatacacacaatcgacggctcttcaggagttgctaatccagcaatggatccaatttatgatgagccgacgacgactactagcgtgcctttgtaagcacaagaaagtgagtacgaacttatgtactcattcgtttcggaagaaacaggtacgttaatagttaatagcgtacttctttttcttgctttcgtggtattcttgctagtcacactagccatccttactgcgcttcgattgtgtgcgtactgctgcaatattgttaacgtgagtttagtaaaaccaacggtttacgtctactcgcgtgttaaaaatctgaactcttctgaaggagttcctgatcttctggtctaaacgaactaactattattattattctgtttggaactttaacattgcttatcatggcagacaacggtactattaccgttgaggagcttaaacaactcctggaacaatggaacctagtaataggtttcctattcctagcctggattatgttactacaatttgcctattctaatcggaacaggtttttgtacataataaagcttgttttcctctggctcttgtggccagtaacacttgcttgttttgtgcttgctgttgtctacagaattaattgggtgactggcgggattgcgattgcaatggcttgtattgtaggcttgatgtggcttagctacttcgttgcttccttcaggctgtttgctcgtacccgctcaatgtggtcattcaacccagaaacaaacattcttctcaatgtgcctctccgggggacaattgtgaccagaccgctcatggaaagtgaacttgtcattggtgctgtgatcattcgtggtcacttgcgaatggccggacactccctagggcgctgtgacattaaggacctgccaaaagagatcactgtggctacatcacgaacgctttcttattacaaattaggagcgtcgcagcgtgtaggcactgattcaggttttgctgcatacaaccgctaccgtattggaaactataaattaaatacagaccacgccggtagcaacgacaatattgctttgctagtacagtaagtgacaacagatgtttcatcttgttgacttccaggttacaatagcagagatattgattatcattatgaggactttcaggattgctatttggaatcttgacgttataataagttcaatagtgagacaattatttaagcctctaactaagaagaattattcggagttagatgatgaagaacctatggagttagattatccataaaacgaacatgaaaattattctcttcctgacattgattgtatttacatcttgcgagctatatcactatcaggagtgtgttagaggtacgactgtactactaaaagaaccttgcccatcaggaacatacgagggcaattcaccatttcaccctcttgctgacaataaatttgcactaacttgcactagcacacactttgcttttgcttgtgctgacggtactcgacatacctatcagctgcgtgcaagatcagtttcaccaaaacttttcatcagacaagaggaggttcaacaagagctctactcgccactttttctcattgttgctgctctagtatttttaatactttgcttcaccattaagagaaagacagaatgaatgagctcactttaattgacttctatttgtgctttttagcctttctgctattccttgttttaataatgcttattatattttggttttcactcgaaatccaggatctagaagaaccttgtaccaaagtctaaacgaacatgaaacttctcattgttttgacttgtatttctctatgcagttgcatatgcactgtagtacagcgctgtgcatctaataaacctcatgtgcttgaagatccttgtaaggtacaacactaggggtaatacttatagcactgcttggctttgtgctctaggaaaggttttaccttttcatagatggcacactatggttcaaacatgcacacctaatgttactatcaactgtcaagatccagctggtggtgcgcttatagctaggtgttggtaccttcatgaaggtcaccaaactgctgcatttagagacgtacttgttgttttaaataaacgaacaaattaaaatgtctgataatggaccccaatcaaaccaacgtagtgccccccgcattacatttggtggacccacagattcaactgacaataaccagaatggaggacgcaatggggcaaggccaaaacagcgccgaccccaaggtttacccaataatattgcgtcttggttcacagctctcactcagcatggcaaggaggaacttagattccctcgaggccagggcgttccaatcaacaccaatagtggtccagatgaccaaattggctactaccgaagagctacccgacgagttcgtggtggtgacggcaaaatgaaagagctcagccccagatggtacttctattacctaggaactggcccagaagcttcacttccctacggcgctaacaaagaaggcatcgtatgggttgcaactgagggagccttgaatacacccaaagaccacattggcacccgcaatcctaataacaatgctgccaccgtgctacaacttcctcaaggaacaacattgccaaaaggcttctacgcagagggaagcagaggcggcagtcaagcctcttctcgctcctcatcacgtagtcgcggtaattcaagaaattcaactcctggcagcagtaggggaaattctcctgctcgaatggctagcggaggtggtgaaactgccctcgcgctattgctgctagacagattgaaccagcttgagagcaaagtttctggtaaaggccaacaacaacaaggccaaactgtcactaagaaatctgctgctgaggcatctaaaaagcctcgccaaaaacgtactgccacaaaacagtacaacgtcactcaagcatttgggagacgtggtccagaacaaacccaaggaaatttcggggaccaagacctaatcagacaaggaactgattacaaacattggccgcaaattgcacaatttgctccaagtgcctctgcattctttggaatgtcacgcattggcatggaagtcacaccttcgggaacatggctgacttatcatggagccattaaattggatgacaaagatccacaattcaaagacaacgtcatactgctgaacaagcacattgacgcatacaaaacattcccaccaacagagcctaaaaaggacaaaaagaaaaagactgatgaagctcagcctttgccgcagagacaaaagaagcagcccactgtgactcttcttcctgc

SEQ ID NO: 11640 - DNA, 29725 bp, SARS coronavirus
ctacccaggaaaagccaaccaacctcgatctcttgtagatctgttctctaaacgaactttaaaatctgtgtagctgtcgctcggctgcatgcctagtgcacctacgcagtataaacaataataaattttactgtcgttgacaagaaacgagtaactcgtccctcttctgcagactgcttacggtttcgtccgtgttgcagtcgatcatcagcatacctaggtttcgtccgggtgtgaccgaaaggtaagatggagagccttgttcttggtgtcaacgagaaaacacacgtccaactcagtttgcctgtccttcaggttagagacgtgctagtgcgtggcttcggggactctgtggaagaggccctatcggaggcacgtgaacacctcaaaaatggcacttgtggtctagtagagctggaaaaaggcgtactgccccagcttgaacagccctatgtgttcattaaacgttctgatgccttaagcaccaatcacggccacaaggtcgttgagctggttgcagaaatggacggcattcagtacggtcgtagcggtataacactgggagtactcgtgccacatgtgggcgaaaccccaattgcataccgcaatgttcttcttcgtaagaacggtaataagggagccggtggtcatagctatggcatcgatctaaagtcttatgacttaggtgacgagcttggcactgatcccattgaagattatgaacaaaactggaacactaagcatggcagtggtgcactccgtgaactcactcgtgagctcaatggaggtgcagtcactcgctatgtcgacaacaatttctgtggcccagatgggtaccctcttgattgcatcaaagattttctcgcacgcgcgggcaagtcaatgtgcactctttccgaacaacttgattacatcgagtcgaagagaggtgtctactgctgccgtgaccatgagcatgaaattgcctggttcactgagcgctctgataagagctacgagcaccagacacccttcgaaattaagagtgccaagaaatttgacactttcaaaggggaatgcccaaagtttgtgtttcctcttaactcaaaagtcaaagtcattcaaccacgtgttgaaaagaaaaagactgagggtttcatggggcgtatacgctctgtgtaccctgttgcatctccacaggagtgtaacaatatgcacttgtctaccttgatgaaatgtaatcattgcgatgaagtttcatggcagacgtgcgactttctgaaagccacttgtgaacattgtggcactgaaaatttagttattgaaggacctactacatgtgggtacctacctactaatgctgtagtgaaaatgccatgtcctgcctgtcaagacccagagattggacctgagcatagtgttgcagattatcacaaccactcaaacattgaaactcgactccgcaagggaggtaggactagatgttttggaggctgtgtgtttgcctatgttggctgctataataagcgtgcctactgggttcctcgtgctagtgctgatattggctcaggccatactggcattactggtgacaatgtggagaccttgaatgaggatctccttgagatactgagtcgtgaacgtgttaacattaacattgttggcgattttcatttgaatgaagaggttgccatcattttggcatctttctctgcttctacaagtgcctttattgacactataaagagtcttgattacaagtctttcaaaaccattgttgagtcctgcggtaactataaagttaccaagggaaagcccgtaaaaggtgcttggaacattggacaacagagatcagttttaacaccactgtgtggttttccctcacaggctgctggtgttatcagatcaatttttgcgcgcacacttgatgcagcaaaccactcaattcctgatttgcaaagagcagctgtcaccatacttgatggtatttctgaacagtcattacgtcttgtcgacgccatggtttatacttcagacctgctcaccaacagtgtcattattatggcatatgtaactggtggtcttgtacaacagacttctcagtggttgtctaatcttttgggcactactgttgaaaaactcaggcctatctttgaatggattgaggcgaaacttagtgcaggagttgaatttctcaaggatgcttgggagattctcaaatttctcattacaggtgtttttgacatcgtcaagggtcaaatacaggttgcttcagataacatcaaggattgtgtaaaatgcttcattgatgttgttaacaaggcactcgaaatgtgcattgatcaagtcactatcgctggcgcaaagttgcgatcactcaacttaggtgaagtcttcatcgctcaaagcaagggactttaccgtcagtgtatacgtggcaaggagcagctgcaactactcatgcctcttaaggcaccaaaagaagtaacctttcttgaaggtgattcacatgacacagtacttacctctgaggaggttgttctcaagaacggtgaactcgaaacactcgagacgcccgttgatagcttcacaaatggagctatcgttggcacaccagtctgtgtaaatggcctcatgctcttagagattaaggacaaagaacaatactgcgcattgtctcctggtttactggctacaaacaatgtctttcgcttaaaagggggtgcaccaattaaaggtgtaacctttggagaagatactgtttgggaagttcaaggttacaagaatgtgagaatcacatttgagcttgatgaacgtgttgacaaagtgcttaatgaaaagtgctctgtctacactgttgaatccggtaccgaagttactgagtttgcatgtgttgtagcagaggctgttgtgaagactttacaaccagtttctgatctccttaccaacatgggtattgatcttgatgagtggagtgtagctacattctacttatttgatgatgctggtgaagaaaacttttcatcacgtatgtattgttccttttaccctccagatgaggaagaagaggacgatgcagagtgtgaggaagaagaaattgatgaaacctgtgaacatgagtacggtacagaggatgattatcaaggtctccctctggaatttggtgcctcagctgaaacagttcgagttgaggaagaagaagaggaagactggctggatgatactactgagcaatcagagattgagccagaaccagaacctacacctgaagaaccagttaatcagtttactggttatttaaaacttactgacaatgttgccattaaatgtgttgacatcgttaaggaggcacaaagtgctaatcctatggtgattgtaaatgctgctaacatacacctgaaacatggtggtggtgtagcaggtgcactcaacaaggcaaccaatggtgccatgcaaaaggagagtgatgattacattaagctaaatggccctcttacagtaggagggtcttgtttgctttctggacataatcttgctaagaagtgtctgcatgttgttggacctaacctaaatgcaggtgaggacatccagcttcttaaggcagcatatgaaaatttcaattcacaggacatcttacttgcaccattgttgtcagcaggcatatttggtgctaaaccacttcagtctttacaagtgtgcgtgcagacggttcgtacacaggtttatattgcagtcaatgacaaagctctttatgagcaggttgtcatggattatcttgataacctgaagcctagagtggaagcacctaaacaagaggagccaccaaacacagaagattccaaaactgaggagaaatctgtcgtacagaagcctgtcgatgtgaagccaaaaattaaggcctgcattgatgaggttaccacaacactggaagaaactaagtttcttaccaataagttactcttgtttgctgatatcaatggtaagctttaccatgattctcagaacatgcttagaggtgaagatatgtctttccttgagaaggatgcaccttacatggtaggtgatgttatcactagtggtgatatcacttgtgttgtaataccctccaaaaaggctggtggcactactgagatgctctcaagagctttgaagaaagtgccagttgatgagtatataaccacgtaccctggacaaggatgtgctggttatacacttgaggaagctaagactgctcttaagaaatgcaaatctgcattttatgtactaccttcagaagcacctaatgctaaggaagagattctaggaactgtatcctggaatttgagagaaatgcttgctcatgctgaagagacaagaaaattaatgcctatatgcatggatgttagagccataatggcaaccatccaacgtaagtataaaggaattaaaattcaagagggcatcgttgactatggtgtccgattcttcttttatactagtaaagagcctgtagcttctattattacgaagctgaactctctaaatgagccgcttgtcacaatgccaattggttatgtgacacatggttttaatcttgaagaggctgcgcgctgtatgcgttctcttaaagctcctgccgtagtgtcagtatcatcaccagatgctgttactacatataatggatacctcacttcgtcatcaaagacatctgaggagcactttgtagaaacagtttctttggctggctcttacagagattggtcctattcaggacagcgtacagagttaggtgttgaatttcttaagcgtggtgacaaaattgtgtaccacactctggagagccccgtcgagtttcatcttgacggtgaggttctttcacttgacaaactaaagagtctcttatccctgcgggaggttaagactataaaagtgttcacaactgtggacaacactaatctccacacacagcttgtggatatgtctatgacatatggacagcagtttggtccaacatacttggatggtgctgatgttacaaaaattaaacctcatgtaaatcatgagggtaagactttctttgtactacctagtgatgacacactacgtagtgaagctttcgagtactaccatactcttgatgagagttttcttggtaggtacatgtctgctttaaaccacacaaagaaatggaaatttcctcaagttggtggtttaacttcaattaaatgggctgataacaattgttatttgtctagtgttttattagcacttcaacagcttgaagtcaaattcaatgcaccagcacttcaagaggcttattatagagcccgtgctggtgatgctgctaacttttgtgcactcatactcgcttacagtaataaaactgttggcgagcttggtgatgtcagagaaactatgacccatcttctacagcatgctaatttggaatctgcaaagcgagttcttaatgtggtgtgtaaacattgtggtcagaaaactactaccttaacgggtgtagaagctgtgatgtatatgggtactctatcttatgataatcttaagacaggtgtttccattccatgtgtgtgtggtcgtgatgctacacaatatctagtacaacaagagtcttcttttgttatgatgtctgcaccacctgctgagtataaattacagcaaggtacattcttatgtgcgaatgagtacactggtaactatcagtgtggtcattacactcatataactgctaaggagaccctctatcgtattgacggagctcaccttacaaagatgtcagagtacaaaggaccagtgactgatgttttctacaaggaaacatcttacactacaaccatcaagcctgtgtcgtataaactcgatggagttacttacacagagattgaaccaaaattggatgggtattataaaaaggataatgcttactatacagagcagcctatagaccttgtaccaactcaaccattaccaaatgcgagttttgataatttcaaactcacatgttctaacacaaaatttgctgatgatttaaatcaaatgacaggcttcacaaagccagcttcacgagagctatctgtcacattcttcccagacttgaatggcgatgtagtggctattgactatagacactattcagcgagtttcaagaaaggtgctaaattactgcataagccaattgtttggcacattaaccaggctacaaccaagacaacgttcaaaccaaacacttggtgtttacgttgtctttggagtacaaagccagtagatacttcaaattcatttgaagttctggcagtagaagacacacaaggaatggacaatcttgcttgtgaaagtcaacaacccacctctgaagaagtagtggaaaatcctaccatacagaaggaagtcatagagtgtgacgtgaaaactaccgaagttgtaggcaatgtcatacttaaaccatcagatgaaggtgttaaagtaacacaagagttaggtcatgaggatcttatggctgcttatgtggaaaacacaagcattaccattaagaaacctaatgagctttcactagccttaggtttaaaaacaattgccactcatggtattgctgcaattaatagtgttccttggagtaaaattttggcttatgtcaaaccattcttaggacaagcagcaattacaacatcaaattgcgctaagagattagcacaacgtgtgtttaacaattatatgccttatgtgtttacattattgttccaattgtgtacttttactaaaagtaccaattctagaattagagcttcactacctacaactattgctaaaaatagtgttaagagtgttgctaaattatgtttggatgccggcattaattatgtgaagtcacccaaattttctaaattgttcacaatcgctatgtggctattgttgttaagtatttgcttaggttctctaatctgtgtaactgctgcttttggtgtactcttatctaattttggtgctccttcttattgtaatggcgttagagaattgtatcttaattcgtctaacgttactactatggatttctgtgaaggttcttttccttgcagcatttgtttaagtggattagactcccttgattcttatccagctcttgaaaccattcaggtgacgatttcatcgtacaagctagacttgacaattttaggtctggccgctgagtgggttttggcatatatgttgttcacaaaattcttttatttattaggtctttcagctataatgcaggtgttctttggctattttgctagtcatttcatcagcaattcttggctcatgtggtttatcattagtattgtacaaatggcacccgtttctgcaatggttaggatgtacatcttctttgcttctttctactacatatggaagagctatgttcatatcatggatggttgcacctcttcgacttgcatgatgtgctataagcgcaatcgtgccacacgcgttgagtgtacaactattgttaatggcatgaagagatctttctatgtctatgcaaatggaggccgtggcttctgcaagactcacaattggaattgtctcaattgtgacacattttgcactggtagtacattcattagtgatgaagttgctcgtgatttgtcactccagtttaaaagaccaatcaaccctactgaccagtcatcgtatattgttgatagtgttgctgtgaaaaatggcgcgcttcacctctactttgacaaggctggtcaaaagacctatgagagacatccgctctcccattttgtcaatttagacaatttgagagctaacaacactaaaggttcactgcctattaatgtcatagtttttgatggcaagtccaaatgcgacgagtctgcttctaagtctgcttctgtgtactacagtcagctgatgtgccaacctattctgttgcttgaccaagctcttgtatcagacgttggagatagtactgaagtttccgttaagatgtttgatgcttatgtcgacaccttttcagcaacttttagtgttcctatggaaaaacttaaggcacttgttgctacagctcacagcgagttagcaaagggtgtagctttagatggtgtcctttctacattcgtgtcagctgcccgacaaggtgttgttgataccgatgttgacacaaaggatgttattgaatgtctcaaactttcacatcactctgacttagaagtgacaggtgacagttgtaacaatttcatgctcacctataataaggttgaaaacatgacgcccagagatcttggcgcatgtattgactgtaatgcaaggcatatcaatgcccaagtagcaaaaagtcacaatgtttcactcatctggaatgtaaaagactacatgtctttatctgaacagctgcgtaaacaaattcgtagtgctgccaagaagaacaacataccttttagactaacttgtgctacaactagacaggttgtcaatgtcataactactaaaatctcactcaagggtggtaagattgttagtacttgttttaaacttatgcttaaggccacattattgtgcgttcttgctgcattggtttgttatatcgttatgccagtacatacattgtcaatccatgatggttacacaaatgaaatcattggttacaaagccattcaggatggtgtcactcgtgacatcatttctactgatgattgttttgcaaataaacatgctggttttgacgcatggtttagccagcgtggtggttcatacaaaaatgacaaaagctgccctgtagtagctgctatcattacaagagagattggtttcatagtgcctggcttaccgggtactgtgctgagagcaatcaatggtgacttcttgcattttctacctcgtgtttttagtgctgttggcaacatttgctacacaccttccaaactcattgagtatagtgattttgctacctctgcttgcgttcttgctgctgagtgtacaatttttaaggatgctatgggcaaacctgtgccatattgttatgacactaatttgctagagggttctatttcttatagtgagcttcgtccagacactcgttatgtgcttatggatggttccatcatacagtttcctaacacttacctggagggttctgttagagtagtaacaacttttgatgctgagtactgtagacatggtacatgcgaaaggtcagaagtaggtatttgcctatctaccagtggtagatgggttcttaataatgagcattacagagctctatcaggagttttctgtggtgttgatgcgatgaatctcatagctaacatctttactcctcttgtgcaacctgtgggtgctttagatgtgtctgcttcagtagtggctggtggtattattgccatattggtgacttgtgctgcctactactttatgaaattcagacgtgtttttggtgagtacaaccatgttgttgctgctaatgcacttttgtttttgatgtctttcactatactctgtctggtaccagcttacagctttctgccgggagtctactcagtcttttacttgtacttgacattctatttcaccaatgatgtttcattcttggctcaccttcaatggtttgccatgttttctcctattgtgcctttttggataacagcaatctatgtattctgtatttctctgaagcactgccattggttctttaacaactatcttaggaaaagagtcatgtttaatggagttacatttagtaccttcgaggaggctgctttgtgtacctttttgctcaacaaggaaatgtacctaaaattgcgtagcgagacactgttgccacttacacagtataacaggtatcttgctctatataacaagtacaagtatttcagtggagccttagatactaccagctatcgtgaagcagcttgctgccacttagcaaaggctctaaatgactttagcaactcaggtgctgatgttctctaccaaccaccacagacatcaatcacttctgctgttctgcagagtggttttaggaaaatggcattcccgtcaggcaaagttgaagggtgcatggtacaagtaacctgtggaactacaactcttaatggattgtggttggatgacacagtatactgtccaagacatgtcatttgcacagcagaagacatgcttaatcctaactatgaagatctgctcattcgcaaatccaaccatagctttcttgttcaggctggcaatgttcaacttcgtgttattggccattctatgcaaaattgtctgcttaggcttaaagttgatacttctaaccctaagacacccaagtataaatttgtccgtatccaacctggtcaaacattttcagttctagcatgctacaatggttcaccatctggtgtttatcagtgtgccatgagacctaatcataccattaaaggttctttccttaatggatcatgtggtagtgttggttttaacattgattatgattgcgtgtctttctgctatatgcatcatatggagcttccaacaggagtacacgctggtactgacttagaaggtaaattctatggtccatttgttgacagacaaactgcacaggctgcaggtacagacacaaccataacattaaatgttttggcatggctgtatgctgctgttatcaatggtgataggtggtttcttaatagattcaccactactttgaatgactttaaccttgtggcaatgaagtacaactatgaacctttgacacaagatcatgttgacatattgggacctctttctgctcaaacaggaattgccgtcttagatatgtgtgctgctttgaaagagctgctgcagaatggtatgaatggtcgtactatccttggtagcactattttagaagatgagtttacaccatttgatgttgttagacaatgctctggtgttaccttccaaggtaagttcaagaaaattgttaagggcactcatcattggatgcttttaactttcttgacatcactattgattcttgttcaaagtacacagtggtcactgtttttctttgtttacgagaatgctttcttgccatttactcttggtattatggcaattgctgcatgtgctatgctgcttgttaagcataagcacgcattcttgtgcttgtttctgttaccttctcttgcaacagttgcttactttaatatggtctacatgcctgctagctgggtgatgcgtatcatgacatggcttgaattggctgacactagcttgtctggttataggcttaaggattgtgttatgtatgcttcagctttagttttgcttattctcatgacagctcgcactgtttatgatgatgctgctagacgtgtttggacactgatgaatgtcattacacttgtttacaaagtctactatggtaatgctttagatcaagctatttccatgtgggccttagttatttctgtaacctctaactattctggtgtcgttacgactattatgtttttagctagagctatagtgtttgtgtgtgttgagtattacccattgttatttattactggcaacaccttacagtgtatcatgcttgtttattgtttcttaggctattgttgctgctgctactttggccttttctgtttactcaaccgttacttcaggcttactcttggtgtttatgactacttggtctctacacaagaatttaggtatatgaactcccaggggcttttgcctcctaagagtagtattgatgctttcaagcttaacattaagttgttgggtattggaggtaaaccatgtatcaaggttgctactgtacagtctaaaatgtctgacgtaaagtgcacatctgtggtactgctctcggttcttcaacaacttagagtagagtcatcttctaaattgtgggcacaatgtgtacaactccacaatgatattcttcttgcaaaagacacaactgaagctttcgagaagatggtttctcttttgtctgttttgctatccatgcagggtgctgtagacattaataggttgtgcgaggaaatgctcgataaccgtgctactcttcaggctattgcttcagaatttagttctttaccatcatatgccgcttatgccactgcccaggaggcctatgagcaggctgtagctaatggtgattctgaagtcgttctcaaaaagttaaagaaatctttgaatgtggctaaatctgagtttgaccgtgatgctgccatgcaacgcaagttggaaaagatggcagatcaggctatgacccaaatgtacaaacaggcaagatctgaggacaagagggcaaaagtaactagtgctatgcaaacaatgctcttcactatgcttaggaagcttgataatgatgcacttaacaacattatcaacaatgcgcgtgatggttgtgttccactcaacatcataccattgactacagcagccaaactcatggttgttgtccctgattatggtacctacaagaacacttgtgatggtaacacctttacatatgcatctgcactctgggaaatccagcaagttgttgatgcggatagcaagattgttcaacttagtgaaattaacatggacaattcaccaaatttggcttggcctcttattgttacagctctaagagccaactcagctgttaaactacagaataatgaactgagtccagtagcactacgacagatgtcctgtgcggctggtaccacacaaacagcttgtactgatgacaatgcacttgcctactataacaattcgaagggaggtaggtttgtgctggcattactatcagaccaccaagatctcaaatgggctagattccctaagagtgatggtacaggtacaatttacacagaactggaaccaccttgtaggtttgttacagacacaccaaaagggcctaaagtgaaatacttgtacttcatcaaaggcttaaacaacctaaatagaggtatggtgctgggcagtttagctgctacagtacgtcttcaggctggaaatgctacagaagtacctgccaattcaactgtgctttccttctgtgcttttgcagtagaccctgctaaagcatataaggattacctagcaagtggaggacaaccaatcaccaactgtgtgaagatgttgtgtacacacactggtacaggacaggcaattactgtaacaccagaagctaacatggaccaagagtcctttggtggtgcttcatgttgtctgtattgtagatgccacattgaccatccaaatcctaaaggattctgtgacttgaaaggtaagtacgtccaaatacctaccacttgtgctaatgacccagtgggttttacacttagaaacacagtctgtaccgtctgcggaatgtggaaaggttatggctgtagttgtgaccaactccgcgaacccttgatgcagtctgcggatgcatcaacgtttttaaacgggtttgcggtgtaagtgcagcccgtcttacaccgtgcggcacaggcactagtactgatgtcgtctacagggcttttgatatttacaacgaaaaagttgctggttttgcaaagttcctaaaaactaattgctgtcgcttccaggagaaggatgaggaaggcaatttattagactcttactttgtagttaagaggcatactatgtctaactaccaacatgaagagactatttataacttggttaaagattgtccagcggttgctgtccatgactttttcaagtttagagtagatggtgacatggtaccacatatatcacgtcagcgtctaactaaatacacaatggctgatttagtctatgctctacgtcattttgatgagggtaattgtgatacattaaaagaaatactcgtcacatacaattgctgtgatgatgattatttcaataagaaggattggtatgacttcgtagagaatcctgacatcttacgcgtatatgctaacttaggtgagcgtgtacgccaatcattattaaagactgtacaattctgcgatgctatgcgtgatgcaggcattgtaggcgtactgacattagataatcaggatcttaatgggaactggtacgatttcggtgatttcgtacaagtagcaccaggctgcggagttcctattgtggattcatattactcattgctgatgcccatcctcactttgactagggcattggctgctgagtcccatatggatgctgatctcgcaaaaccacttattaagtgggatttgctgaaatatgattttacggaagagagactttgtctcttcgaccgttattttaaatattgggaccagacataccatcccaattgtattaactgtttggatgataggtgtatccttcattgtgcaaactttaatgtgttattttctactgtgtttccacctacaagttttggaccactagtaagaaaaatatttgtagatggtgttccttttgttgtttcaactggataccattttcgtgagttaggagtcgtacataatcaggatgtaaacttacatagctcgcgtctcagtttcaaggaacttttagtgtatgctgctgatccagctatgcatgcagcttctggcaatttattgctagataaacgcactacatgcttttcagtagctgcactaacaaacaatgttgcttttcaaactgtcaaacccggtaattttaataaagacttttatgactttgctgtgtctaaaggtttctttaaggaaggaagttctgttgaactaaaacacttcttctttgctcaggatggcaacgctgctatcagtgattatgactattatcgttataatctgccaacaatgtgtgatatcagacaactcctattcgtagttgaagttgttgataaatactttgattgttacgatggtggctgtattaatgccaaccaagtaatcgttaacaatctggataaatcagctggtttcccatttaataaatggggtaaggctagactttattatgactcaatgagttatgaggatcaagatgcacttttcgcgtatactaagcgtaatgtcatccctactataactcaaatgaatcttaagtatgccattagtgcaaagaatagagctcgcaccgtagctggtgtctctatctgtagtactatgacaaatagacagtttcatcagaaattattgaagtcaatagccgccactagaggagctactgtggtaattggaacaagcaagttttacggtggctggcataatatgttaaaaactgtttacagtgatgtagaaactccacaccttatgggttgggattatccaaaatgtgacagagccatgcctaacatgcttaggataatggcctctcttgttcttgctcgcaaacataacacttgctgtaacttatcacaccgtttctacaggttagctaacgagtgtgcgcaagtattaagtgagatggtcatgtgtggcggctcactatatgttaaaccaggtggaacatcatccggtgatgctacaactgcttatgctaatagtgtctttaacatttgtcaagctgttacagccaatgtaaatgcacttctttcaactgatggtaataagatagctgacaagtatgtccgcaatctacaacacaggctctatgagtgtctctatagaaatagggatgttgatcatgaattcgtggatgagttttacgcttacctgcgtaaacatttctccatgatgattctttctgatgatgccgttgtgtgctataacagtaactatgcggctcaaggtttagtagctagcattaagaactttaaggcagttctttattatcaaaataatgtgttcatgtctgaggcaaaatgttggactgagactgaccttactaaaggacctcacgaattttgctcacagcatacaatgctagttaaacaaggagatgattacgtgtacctgccttacccagatccatcaagaatattaggcgcaggctgttttgtcgatgatattgtcaaaacagatggtacacttatgattgaaaggttcgtgtcactggctattgatgcttacccacttacaaaacatcctaatcaggagtatgctgatgtctttcacttgtatttacaatacattagaaagttacatgatgagcttactggccacatgttggacatgtattccgtaatgctaactaatgataacacctcacggtactgggaacctgagttttatgaggctatgtacacaccacatacagtcttgcaggctgtaggtgcttgtgtattgtgcaattcacagacttcacttcgttgcggtgcctgtattaggagaccattcctatgttgcaagtgctgctatgaccatgtcatttcaacatcacacaaattagtgttgtctgttaatccctatgtttgcaatgccccaggttgtgatgtcactgatgtgacacaactgtatctaggaggtatgagctattattgcaagtcacataagcctcccattagttttccattatgtgctaatggtcaggtttttggtttatacaaaaacacatgtgtaggcagtgacaatgtcactgacttcaatgcgatagcaacatgtgattggactaatgctggcgattacatacttgccaacacttgtactgagagactcaagcttttcgcagcagaaacgctcaaagccactgaggaaacatttaagctgtcatatggtattgccactgtacgcgaagtactctctgacagagaattgcatctttcatgggaggttggaaaacctagaccaccattgaacagaaactatgtctttactggttaccgtgtaactaaaaatagtaaagtacagattggagagtacacctttgaaaaaggtgactatggtgatgctgttgtgtacagaggtactacgacatacaagttgaatgttggtgattactttgtgttgacatctcacactgtaatgccacttagtgcacctactctagtgccacaagagcactatgtgagaattactggcttgtacccaacactcaacatctcagatgagttttctagcaatgttgcaaattatcaaaaggtcggcatgcaaaagtactctacactccaaggaccacctggtactggtaagagtcattttgccatcggacttgctctctattacccatctgctcgcatagtgtatacggcatgctctcatgcagctgttgatgccctatgtgaaaaggcattaaaatatttgcccatagataaatgtagtagaatcatacctgcgcgtgcgcgcgtagagtgttttgataaattcaaagtgaattcaacactagaacagtatgttttctgcactgtaaatgcattgccagaaacaactgctgacattgtagtctttgatgaaatctctatggctactaattatgacttgagtgttgtcaatgctagacttcgtgcaaaacactacgtctatattggcgatcctgctcaattaccagccccccgcacattgctgactaaaggcacactagaaccagaatattttaattcagtgtgcagacttatgaaaacaataggtccagacatgttccttggaacttgtcgccgttgtcctgctgaaattgttgacactgtgagtgctttagtttatgacaataagctaaaagcacacaaggataagtcagctcaatgcttcaaaatgttctacaaaggtgttattacacatgatgtttcatctgcaatcaacagacctcaaataggcgttgtaagagaatttcttacacgcaatcctgcttggagaaaagctgtttttatctcaccttataattcacagaacgctgtagcttcaaaaatcttaggattgcctacgcagactgttgattcatcacagggttctgaatatgactatgtcatattcacacaaactactgaaacagcacactcttgtaatgtcaaccgcttcaatgtggctatcacaagggcaaaaattggcattttgtgcataatgtctgatagagatctttatgacaaactgcaatttacaagtctagaaataccacgtcgcaatgtggctacattacaagcagaaaatgtaactggactttttaaggactgtagtaagatcattactggtcttcatcctacacaggcacctacacacctcagcgttgatataaagttcaagactgaaggattatgtgttgacataccaggcataccaaaggacatgacctaccgtagactcatctctatgatgggtttcaaaatgaattaccaagtcaatggttaccctaatatgtttatcacccgcgaagaagctattcgtcacgttcgtgcgtggattggctttgatgtagagggctgtcatgcaactagagatgctgtgggtactaacctacctctccagctaggattttctacaggtgttaacttagtagctgtaccgactggttatgttgacactgaaaataacacagaattcaccagagttaatgcaaaacctccaccaggtgaccagtttaaacatcttataccactcatgtataaaggcttgccctggaatgtagtgcgtattaagatagtacaaatgctcagtgatacactgaaaggattgtcagacagagtcgtgttcgtcctttgggcgcatggctttgagcttacatcaatgaagtactttgtcaagattggacctgaaagaacgtgttgtctgtgtgacaaacgtgcaacttgcttttctacttcatcagatacttatgcctgctggaatcattctgtgggttttgactatgtctataacccatttatgattgatgttcagcagtggggctttacgggtaaccttcagagtaaccatgaccaacattgccaggtacatggaaatgcacatgtggctagttgtgatgctatcatgactagatgtttagcagtccatgagtgctttgttaagcgcgttgattggtctgttgaataccctattataggagatgaactgagggttaattctgcttgcagaaaagtacaacacatggttgtgaagtctgcattgcttgctgataagtttccagttcttcatgacataggaaatccaaaggctatcaagtgtgtgcctcaggctgaagtagaatggaagttctacgatgctcagccatgtagtgacaaagcttacaaaatagaggaactcttctattcttatgctatacatcacgataaattcactgatggtgtttgtttgttttggaattgtaacgttgatcgttacccagccaatgcaattgtgtgtaggtttgacacaagagtcttgtcaaacttgaacttaccaggctgtgatggtggtagtttgtatgtgaataagcatgcattccacactccagctttcgataaaagtgcatttactaatttaaagcaattgcctttcttttactattctgatagtccttgtgagtctcatggcaaacaagtagtgtcggatattgattatgttccactcaaatctgctacgtgtattacacgatgcaatttaggtggtgctgtttgcagacaccatgcaaatgagtaccgacagtacttggatgcatataatatgatgatttctgctggatttagcctatggatttacaaacaatttgatacttataacctgtggaatacatttaccaggttacagagtttagaaaatgtggcttataatgttgttaataaaggacactttgatggacacgccggcgaagcacctgtttccatcattaataatgctgtttacacaaaggtagatggtattgatgtggagatctttgaaaataagacaacacttcctgttaatgttgcatttgagctttgggctaagcgtaacattaaaccagtgccagagattaagatactcaataatttgggtgttgatatcgctgctaatactgtaatctgggactacaaaagagaagccccagcacatgtatctacaataggtgtctgcacaatgactgacattgccaagaaacctactgagagtgcttgttcttcacttactgtcttgtttgatggtagagtggaaggacaggtagacctttttagaaacgcccgtaatggtgttttaataacagaaggttcagtcaaaggtctaacaccttcaaagggaccagcacaagctagcgtcaatggagtcacattaattggagaatcagtaaaaacacagtttaactactttaagaaagtagacggcattattcaacagttgcctgaaacctactttactcagagcagagacttagaggattttaagcccagatcacaaatggaaactgactttctcgagctcgctatggatgaattcatacagcgatataagctcgagggctatgccttcgaacacatcgtttatggagatttcagtcatggacaacttggcggtcttcatttaatgataggcttagccaagcgctcacaagattcaccacttaaattagaggattttatccctatggacagcacagtgaaaaattacttcataacagatgcgcaaacaggttcatcaaaatgtgtgtgttctgtgattgatcttttacttgatgactttgtcgagataataaagtcacaagatttgtcagtgatttcaaaagtggtcaaggttacaattgactatgctgaaatttcattcatgctttggtgtaaggatggacatgttgaaaccttctacccaaaactacaagcaagtcaagcgtggcaaccaggtgttgcgatgcctaacttgtacaagatgcaaagaatgcttcttgaaaagtgtgaccttcagaattatggtgaaaatgctgttataccaaaaggaataatgatgaatgtcgcaaagtatactcaactgtgtcaatacttaaatacacttactttagctgtaccctacaacatgagagttattcactttggtgctggctctgataaaggagttgcaccaggtacagctgtgctcagacaatggttgccaactggcacactacttgtcgattcagatcttaatgacttcgtctccgacgcagattctactttaattggagactgtgcaacagtacatacggctaataaatgggaccttattattagcgatatgtatgaccctaggaccaaacatgtgacaaaagagaatgactctaaagaagggtttttcacttatctgtgtggatttataaagcaaaaactagccctgggtggttctatagctgtaaagataacagagcattcttggaatgctgacctttacaagcttatgggccatttctcatggtggacagcttttgttacaaatgtaaatgcatcatcatcggaagcatttttaattggggctaactatcttggcaagccgaaggaacaaattgatggctataccatgcatgctaactacattttctggaggaacacaaatcctatccagttgtcttcctattcactctttgacatgagcaaatttcctcttaaattaagaggaactgctgtaatgtctcttaaggagaatcaaatcaatgatatgatttattctcttctggaaaaaggtaggcttatcattagagaaaacaacagagttgtggtttcaagtgatattcttgttaacaactaaacgaacatgtttattttcttattatttcttactctcactagtggtagtgaccttgaccggtgcaccacttttgatgatgttcaagctcctaattacactcaacatacttcatctatgaggggggtttactatcctgatgaaatttttagatcagacactctttatttaactcaggatttatttcttccattttattctaatgttacagggtttcatactattaatcatacgtttggcaaccctgtcataccttttaaggatggtatttattttgctgccacagagaaatcaaatgttgtccgtggttgggtttttggttctaccatgaacaacaagtcacagtcggtgattattattaacaattctactaatgttgttatacgagcatgtaactttgaattgtgtgacaaccctttctttgctgtttctaaacccatgggtacacagacacatactatgatattcgataatgcatttaattgcactttcgagtacatatctgatgccttttcgcttgatgtttcagaaaagtcaggtaattttaaacacttacgagagtttgtgtttaaaaataaagatgggtttctctatgtttataagggctatcaacctatagatgtagttcgtgatctaccttctggttttaacactttgaaacctatttttaagttgcctcttggtattaacattacaaattttagagccattcttacagccttttcacctgctcaagacatttggggcacgtcagctgcagcctattttgttggctatttaaagccaactacatttatgctcaagtatgatgaaaatggtacaatcacagatgctgttgattgttctcaaaatccacttgctgaactcaaatgctctgttaagagctttgagattgacaaaggaatttaccagacctctaatttcagggttgttccctcaggagatgttgtgagattccctaatattacaaacttgtgtccttttggagaggtttttaatgctactaaattcccttctgtctatgcatgggagagaaaaaaaatttctaattgtgttgctgattactctgtgctctacaactcaacatttttttcaacctttaagtgctatggcgtttctgccactaagttgaatgatctttgcttctccaatgtctatgcagattcttttgtagtcaagggagatgatgtaagacaaatagcgccaggacaaactggtgttattgctgattataattataaattgccagatgatttcatgggttgtgtccttgcttggaatactaggaacattgatgctacttcaactggtaattataattataaatataggtatcttagacatggcaagcttaggccctttgagagagacatatctaatgtgcctttctcccctgatggcaaaccttgcaccccacctgctcttaattgttattggccattaaatgattatggtttttacaccactactggcattggctaccaaccttacagagttgtagtactttcttttgaacttttaaatgcaccggccacggtttgtggaccaaaattatccactgaccttattaagaaccagtgtgtcaattttaattttaatggactcactggtactggtgtgttaactccttcttcaaagagatttcaaccatttcaacaatttggccgtgatgtttctgatttcactgattccgttcgagatcctaaaacatctgaaatattagacatttcaccttgctcttttgggggtgtaagtgtaattacacctggaacaaatgcttcatctgaagttgctgttctatatcaagatgttaactgcactgatgtttctacagcaattcatgcagatcaactcacaccagcttggcgcatatattctactggaaacaatgtattccagactcaagcaggctgtcttataggagctgagcatgtcgacacttcttatgagtgcgacattcctattggagctggcatttgtgctagttaccatacagtttctttattacgtagtactagccaaaaatctattgtggcttatactatgtctttaggtgctgatagttcaattgcttactctaataacaccattgctatacctactaacttttcaattagcattactacagaagtaatgcctgtttctatggctaaaacctccgtagattgtaatatgtacatctgcggagattctactgaatgtgctaatttgcttctccaatatggtagcttttgcacacaactaaatcgtgcactctcaggtattgctgctgaacaggatcgcaacacacgtgaagtgttcgctcaagtcaaacaaatgtacaaaaccccaactttgaaatattttggtggttttaatttttcacaaatattacctgaccctctaaagccaactaagaggtcttttattgaggacttgctctttaataaggtgacactcgctgatgctggcttcatgaagcaatatggcgaatgcctaggtgatattaatgctagagatctcatttgtgcgcagaagttcaatggacttacagtgttgccacctctgctcactgatgatatgattgctgcctacactgctgctctagttagtggtactgccactgctggatggacatttggtgctggcgctgctcttcaaataccttttgctatgcaaatggcatataggttcaatggcattggagttacccaaaatgttctctatgagaaccaaaaacaaatcgccaaccaatttaacaaggcgattagtcaaattcaagaatcacttacaacaacatcaactgcattgggcaagctgcaagacgttgttaaccagaatgctcaagcattaaacacacttgttaaacaacttagctctaattttggtgcaatttcaagtgtgctaaatgatatcctttcgcgacttgataaagtcgaggcggaggtacaaattgacaggttaattacaggcagacttcaaagccttcaaacctatgtaacacaacaactaatcagggctgctgaaatcagggcttctgctaatcttgctgctactaaaatgtctgagtgtgttcttggacaatcaaaaagagttgacttttgtggaaagggctaccaccttatgtccttcccacaagcagccccgcatggtgttgtcttcctacatgtcacgtatgtgccatcccaggagaggaacttcaccacagcgccagcaatttgtcatgaaggcaaagcatacttccctcgtgaaggtgtttttgtgtttaatggcacttcttggtttattacacagaggaacttcttttctccacaaataattactacagacaatacatttgtctcaggaaattgtgatgtcgttattggcatcattaacaacacagtttatgatcctctgcaacctgagcttgactcattcaaagaagagctggacaagtacttcaaaaatcatacatcaccagatgttgattttggcgacatttcaggcattaacgcttctgtcgtcaacattcaaaaagaaattgaccgcctcaatgaggtcgctaaaaatttaaatgaatcactcattgaccttcaagaattgggaaaatatgagcaatatattaaatggccttggtatgtttggctcggcttcattgctggactaattgccatcgtcatggttacaatcttgctttgttgcatgactagttgttgcagttgcctcaagggtgcatgctcttgtggttcttgctgcaagtttgatgaggatgactctgagccagttctcaagggtgtcaaattacattacacataaacgaacttatggatttgtttatgagattttttactcttggatcaattactgcacagccagtaaaaattgacaatgcttctcctgcaagtactgttcatgctacagcaacgataccgctacaagcctcactccctttcggatggcttgttattggcgttgcatttcttgctgtttttcagagcgctaccaaaataattgcgctcaataaaagatggcagctagccctttataagggcttccagttcatttgcaatttactgctgctatttgttaccatctattcacatcttttgcttgtcgctgcaggtatggaggcgcaatttttgtacctctatgccttgatatattttctacaatgcatcaacgcatgtagaattattatgagatgttggctttgttggaagtgcaaatccaagaacccattactttatgatgccaactactttgtttgctggcacacacataactatgactactgtataccatataacagtgtcacagatacaattgtcgttactgaaggtgacggcatttcaacaccaaaactcaaagaagactaccaaattggtggttattctgaggataggcactcaggtgttaaagactatgtcgttgtacatggctatttcaccgaagtttactaccagcttgagtctacacaaattactacagacactggtattgaaaatgctacattcttcatctttaacaagcttgttaaagacccaccgaatgtgcaaatacacacaatcgacggctcttcaggagttgctaatccagcaatggatccaatttatgatgagccgacgacgactactagcgtgcctttgtaagcacaagaaagtgagtacgaacttatgtactcattcgtttcggaagaaacaggtacgttaatagttaatagcgtacttctttttcttgctttcgtggtattcttgctagtcacactagccatccttactgcgcttcgattgtgtgcgtactgctgcaatattgttaacgtgagtttagtaaaaccaacggtttacgtctactcgcgtgttaaaaatctgaactcttctgaaggagttcctgatcttctggtctaaacgaactaactattattattattctgtttggaactttaacattgcttatcatggcagacaacggtactattaccgttgaggagcttaaacaactcctggaacaatggaacctagtaataggtttcctattcctagcctggattatgttactacaatttgcctattctaatcggaacaggtttttgtacataataaagcttgttttcctctggctcttgtggccagtaacacttgcttgttttgtgcttgctgttgtctacagaattaattgggtgactggcgggattgcgattgcaatggcttgtattgtaggcttgatgtggcttagctacttcgttgcttccttcaggctgtttgctcgtacccgctcaatgtggtcattcaacccagaaacaaacattcttctcaatgtgcctctccgggggacaattgtgaccagaccgctcatggaaagtgaacttgtcattggtgctgtgatcattcgtggtcacttgcgaatggccggacactccctagggcgctgtgacattaaggacctgccaaaagagatcactgtggctacatcacgaacgctttcttattacaaattaggagcgtcgcagcgtgtaggcactgattcaggttttgctgcatacaaccgctaccgtattggaaactataaattaaatacagaccacgccggtagcaacgacaatattgctttgctagtacagtaagtgacaacagatgtttcatcttgttgacttccaggttacaatagcagagatattgattatcattatgaggactttcaggattgctatttggaatcttgacgttataataagttcaatagtgagacaattatttaagcctctaactaagaagaattattcggagttagatgatgaagaacctatggagttagattatccataaaacgaacatgaaaattattctcttcctgacattgattgtatttacatcttgcgagctatatcactatcaggagtgtgttagaggtacgactgtactactaaaagaaccttgcccatcaggaacatacgagggcaattcaccatttcaccctcttgctgacaataaatttgcactaacttgcactagcacacactttgcttttgcttgtgctgacggtactcgacatacctatcagctgcgtgcaagatcagtttcaccaaaacttttcatcagacaagaggaggttcaacaagagctctactcgccactttttctcattgttgctgctctagtatttttaatactttgcttcaccattaagagaaagacagaatgaatgagctcactttaattgacttctatttgtgctttttagcctttctgctattccttgttttaataatgcttattatattttggttttcactcgaaatccaggatctagaagaaccttgtaccaaagtctaaacgaacatgaaacttctcattgttttgacttgtatttctctatgcagttgcatatgcactgtagtacagcgctgtgcatctaataaacctcatgtgcttgaagatccttgtaaggtacaacactaggggtaatacttatagcactgcttggctttgtgctctaggaaaggttttaccttttcatagatggcacactatggttcaaacatgcacacctaatgttactatcaactgtcaagatccagctggtggtgcgcttatagctaggtgttggtaccttcatgaaggtcaccaaactgctgcatttagagacgtacttgttgttttaaataaacgaacaaattaaaatgtctgataatggaccccaatcaaaccaacgtagtgccccccgcattacatttggtggacccacagattcaactgacaataaccagaatggaggacgcaatggggcaaggccaaaacagcgccgaccccaaggtttacccaataatattgcgtcttggttcacagctctcactcagcatggcaaggaggaacttagattccctcgaggccagggcgttccaatcaacaccaatagtggtccagatgaccaaattggctactaccgaagagctacccgacgagttcgtggtggtgacggcaaaatgaaagagctcagccccagatggtacttctattacctaggaactggcccagaagcttcacttccctacggcgctaacaaagaaggcatcgtatgggttgcaactgagggagccttgaatacacccaaagaccacattggcacccgcaatcctaataacaatgctgccaccgtgctacaacttcctcaaggaacaacattgccaaaaggcttctacgcagagggaagcagaggcggcagtcaagcctcttctcgctcctcatcacgtagtcgcggtaattcaagaaattcaactcctggcagcagtaggggaaattctcctgctcgaatggctagcggaggtggtgaaactgccctcgcgctattgctgctagacagattgaaccagcttgagagcaaagtttctggtaaaggccaacaacaacaaggccaaactgtcactaagaaatctgctgctgaggcatctaaaaagcctcgccaaaaacgtactgccacaaaacagtacaacgtcactcaagcatttgggagacgtggtccagaacaaacccaaggaaatttcggggaccaagacctaatcagacaaggaactgattacaaacattggccgcaaattgcacaatttgctccaagtgcctctgcattctttggaatgtcacgcattggcatggaagtcacaccttcgggaacatggctgacttatcatggagccattaaattggatgacaaagatccacaattcaaagacaacgtcatactgctgaacaagcacattgacgcatacaaaacattcccaccaacagagcctaaaaaggacaaaaagaaaaagactgatgaagctcagcctttgccgcagagacaaaagaagcagcccactgtgactcttcttcctgcggctgacatggatgatttctccagacaacttcaaaattccatgagtggagcttctgctgattcaactcaggcataaacactcatgatgaccacacaaggcagatgggctatgtaaacgttttcgcaattccgtttacgatacatagtctactcttgtgcagaatgaattctcgtaactaaacagcacaagtaggtttagttaactttaatctcacatagcaatctttaatcaatgtgtaacattagggaggacttgaaagagccaccacattttcatcgaggccacgcggagtacgatcgagggtacagtgaataatgctagggagagctgcctatatggaagagccctaatgtgtaaaattaattttagtagtgctatccccatgtgattttaatagcttcttaggagaatgacaaaaaaaaaaaaa

SEQ ID NO: 11641 - protein, 39 aa, SARS coronavirus; identical to SEQ ID NO: 9965
